United States Patent Application Publication US 2007/0237770 A1 - sequence listing, part 16

SEQ ID NO: 1742 - DNA, 256294 bp, Mus musculus
  misc_feature (1)...(256294): n = a, t, c, or g
ccagagggatgcgggcggcagagcgcgagaggcggcggctgggctgcggggcgctgtgactgtccctccacccagtctggtcgcgctcttctcttcggccgattggccgcctcctctccgcaccctggtttctgtctcctgctcctcctttgccccgaccctgttccttatggcagcagctccttgcatcgggggcgcagcttctcagcggactatcctctcactccgcaggctgagcccggtcactggatgttgctgaaactccggagatcatgctctcctttggtcgcagtatcaccgccggctgtccctgccgccgccccctcctctgctgccgcggtccgcgggatgctcagtagcccgctgcgtggcccctgcgatcccgtgttcttcagaagcctttggttgctgcagagttgcgcgaagtagtcatggtgctgtgggagtccccgcggcagtgcagcagctggacactttgcgagggcttctgctggctgctgctgctgcccgtgacgctgcttatcatagcccgcccggtaaaactcgctgctttccctacctccttaagtgactgccaaacgcccaccggctggaactgctccggtaagtccagaccctcagccctctacttcacttctccaagcgcggaacccgcacagacctgtctactctcatatgtctgcccagccactgcctgaaacccagaacttcccacctcaatcctgagaaacattgagaactgcttcagctaaggctgggcgtgctgggataggaacaaagtacaggtgtggggaaccatagatgtttgcccctttcaaatcggaggatttagagaaatactacagaggtagttctccatcctgggggaaaacactaacgcagaacatttcccatcattaaaaaaaataaaaataaaaataaaagagtctagcctggatgtgcgaaaaataactttatgagaaagaacaatcaagaaagcaataaatcaaatgatgactgcagggaaactgttaaggctgccgaaaatgcttctgaatgcaggggttttctagtcagcactgggccacagataattctaaggaggcaagtttccaggaacggagtctctctctctctctctctctctctctctctctctctctctctctctctctctcttcctcctctcctctnnnnnnnnnnnnnnnnnnnnnnnnnnnnnnnnnnnnnnnnnnnnnnnnnnnnnnnnnnnnnnnnnnnnnnnnnnnnnnnnnnnntggctgcaaatgccattgactttgaaagacattgattttgtagccaaagtatgcccatccaagttcttatgtggaggacagaagttgagaaagaagcaaacatagatccccgccccctcccccacgccagaatgggcatgccccaaggctgatagactctcttctgagagcacagtgaccctaccatggcaggtcccaaccccttcacttctgcactgggtttcattgtcaggcagtcctcttgctcattcagtctctgtcagaatactgaagcttgacacctgcatgctattgaagcctctaattgaaaggggcccaaagatcgaagttactgcactcttactggctggttttacatttcagtatcagagtgtctagtttacctgaagaatcatagtgtaatttctttggcattttaaactctataagcacacatggtcattgtctccatggtctaatctggtcttgttttagcaagtgtgtttataacatttcattttagttaagtaaaatcttctcacaattaaatccgactttgaataagatagcctttggagatgtgtaagtgaaaggaagtgtgtgtaacttttgagaggatgtgattattaaatataacttataggtagaggcatgtacagttctaagagatgactaatacaactcttgaggtcaattaattaatgtgcaccactccagtttaaccttggctaagacaagttgaaatgtacagtcatattagatttgggtcagtagactgacttggttcttcttttggtaatttctaaatttggcattttatgaaacacaacatgtctctaacttattcttagttccttcattcatgtatgctattttaaaaagaataaattccacttgggaacagaacatccttaaaatttgatcataactaatgttcaacatgactagcttgtttcctaactaatattggtattaggaatacctagcttgaatataacattgacaatgaggaaatgtgttataaaccagatctctcaaagctgtgttcactaactaaaaatgaagaactgtatttctggaaggttgtgaagagcttggcagcccccacccatccctgttaacttgaaggtgatcaatcttcctttgagtcagaaagaccttcacagaaaacaccaagtctgtttatctttattattgaggttttgcttcctctttgtctggaaaaaaaactgtaagtaagggtcatttcatatcttaaagcgaagaacaattaaaggcagaaatattaaaatggcaactacaaaccatcaccaaatcttttcctaaatattgagtttgggtcactgatataccctacttagtgaggaaaaaaattaaaaagaaagcagagaagcaaatgtcaaactttcactcacacagtcactattagtctaagctaaatttaagaaagcatgctcaaaaggtgatactgagggagactttattaggaaacagttgtaaatgtatggactattattgatcacttttgaggttattagtagaaggcacacttgtggctgttggaattaaattttaagaaaattctgtttgtgctacaaactagaattctctttatacattataacattttaaagtgactggagcattctttttcaacttgaggttacgatgacagagaaaatgatctcttcctgtgtgacaccaacacctgtaaatttgacggggaatgtttaaggattggagacactgtgacttgcgtctgtcagttcaaggtaagatatctgatatttgcatcttcaattcattaaagaggctgcaaggcagtgagcttcttgtacaactcatcatttggcaagttataactgtacagactcaaaaggaggctagcatcaaacaaaagtactggcaagagagcaagctgatgtcaaggtgacatataacttttcgggacctgtgactgacctagtcaaaaatgccactgatgttggataagcttcagtttctactttctagatatggacggaaagtgtgccttcctgaagcactggtgtgtacattttataggtcaactgactgaggataattgtcaaaatagtcagtggatagcagatatggatttgtacttttgttcttcacaagttgtcattattattatttattatattgtcgtttgttttaatgggctttggttttcttatcctgtcaagaggatgcaattttatgttaacttctataaggtcactcctaaactactgtgccagtttggaaatcatgaaccttgttgtatacattaaagattttgagactagcacattaaacaactacagagtctcctaggaattcatatgagcacatagagcctcatgttgaatcgtaagcagaacggtggacattgtcatctgtcagagaggttttcaacagttagaaagaaaagtatatttttacaaagaagttatcatcaaagttgttaaaatgaatttaaaataatgcttccattgttgttattacaatcattatttatcccatttgccactatgaaaattactggagtctgcttcttttcaaaatattcatataataatatatagcctcaaataacttggatgttgaactagtaccgtggactcacacttgattattattgaattacatttaacaccaaacatttacatctaatttaagctgatgcaagaaatatgcatataaataaaactatgaacaagatcaaaggcacttccaaaattataaaagcatgagttgttgaaaactagaaacacaaagtcatattttgacttactgtaccatattgaatattgacttaatggtgaatacataggacttaaccctacatcttggtgaggcagataagaaaactcacctttaaatatgggttgagatacttttagagaagataaaagctccttgtgcattttttcctcctttttgagaaacagagcaagattattggtagcttaaagtggccaaagacattgccatggctttagcgatccatcagtgcagatcacatacatgtggcatctactttcagggtctcccccacagtgagggaagagctacgtgaaggagatggaacatgagaattttcaatttataatttttataattgataactaaagaggatggaaaaccaactggagaaatcacgcccatggaatttcataccttttctttttctttttaagtttgtgattcctgagaatttctcttatttttgtagccagggataggtacagcaagtaaacttgtaattagcagaagatggttcacaaagcacattcttcaaatgagatgtttgtgtttcactggaaaaaaaaaaaactggtgtaattctgggtaaatgcgcaaaatggaagcatatcatttttcctattaaagaactgtctgtgtttgatttttagctgccaaatgaaaatttaaataggaaatataaatatatttccttatttgtactggattatactgttattagtgtgttttacaataataagtaatttaagaggaaaaaatctttctagtagtaaatttaaactttgtatatttatcataattattgaatgtctacaccaagttgatggttaaataaaattgtacaacttgcatgagataaactatgttaagctaggagctccttgaacaagtttcttcccagtcttcagcattttcatgttgttttgtgtgttttttttctattttttaatgttttctccccttctatctgataaaaatgaagacatctgaaaatctcttctatgtagtatcctaaatttttgttccttgtgcattttcagatatgagtgtaagttattatatttaaaatgggatgtacattagtctttctggacatgagataaatttcaaacataaatgcacatattgtacataacctaaatatgttcctatatgtgttattattaaaacactaaaatgagcttatatgaatctgacttcccttagatactttaaaatacactaatttctacccttcaaaattcattcaattcttataagttagataagtttgtttagctgactcactactttttcctttcttccatcttcccttctttttttcccacttttcttacttcttctgcattgctggtgacataaccaggaccttgcatgtactaggcaagtgctccaccattgagatatattcccaggtcctttacattgtttataagatgaggaaattcatggccattaatataaatagtttccaattaagtaagtcataattctagaaaatgaaacacagtaaaccaaatgatatatttacatttaagtgcatcaattataatttttaatattacttagggttcaaatgaaaattccaataacacaacagcaatgtcagcttattatagacaatgattcgtaatcaaaacaatacaaagtagaatatctgtaacccagaagtccaaattcggaaatagtctgaaatccatcatgatgtttaaaatgttttgaactttctaagtgtttctgactgagagtgttttgaatagatgctcaaaaggtgaagtctatcctgtcattccacaaatgccaagatctcaaattttgtgcctctaaaacacattggatacggggtattaaacctatacaaataattcttagataataaaataaaaacttataatatgatacagtctcaggcatcccatcttcctacgaaatatcaaaaataactagtcaacctgataaatcaattgtgaagaaaaactgaaaaagtgaatagaagaaaatggatgaataaacaaaggaaaaacaacagaaaggtgaaaggaggaagggaggcagataaagagatatagtttttcttagtactggttccacaatgatcaatgataatttataagcttaatgtatcaggtagccttatgctttcttaagaattttccaatttagatattaaatagttgcatttactaaactatgttttatatctaaaaatgttcagttactactgctgctcaaagatttccccagaacgtagggtcttcatgaatgtttattttcttcatagatgtgcagttttgattagttattggaacagttttcgtcactctctgttgtcatggctaaggggaactcaaggcatcctcagttcagggctctaatgcatgtgactaccaactgtggagcttggttcgtctccacctctgaatcctctcatgggctacttgtactttgggctttgacatagcacaatggctagttttaaagggcaagcatccagaaagaggggagaagacaagtgaaacccatgtcctttcatgatttaacatagagagttatagtcacatcagccacggtcaaagacctgcccatttgtttaaaaaaaaatcaccaacataatgcatgcaagatgtagttctgaagaattaaaagttacttttggaactgccaaacagcaacacatacagatttttaaacattttattctctgaaaaagttattattttatatcttaagctattctccctcagcctttgacaacagactataacagaattcacttaacatctgttgagaaccttctccatgccagactctgtggaaggtgctggcgagagatgaaacttaagtcacatatagctttgagatgcggaattttcagctttaaaatccatattaaccaaacaagcattgaatcacattttaaatttctctttttttttattccctggccaaggggtagtgtatgggtgtcttaagcaatgcggaaccttggagacaatgccattttattgaaatcacatatttggaaaataaacttcagatttttaaaaacaaggaaaatggaaccacaaattcttcttataagcttatataatacatacatttatagacttaaccatagccatggcttaattttttttttgttaaccagatagctttgtagtctttagtaagtgaccaaacatctattttccccttattcagactgtaaacaagttcttgacagccccagaaccattttcaagaactcggcatatttcagtgcagcagtttcccgattctcatacagagggtggccgcagcttcattgttttctaattctaaaaacatcatggtacttcactgtgaatgctaggtggaaattctgctagtaaaaataagccatgaatatcagataatttccatttaataggtgaagtttacaatgaaacttgtgttcttaaatcttgtgtaaatctcccatgtatctcagttcactactttagaaacttacaaacctttaactactgagtaacataccatcccctatatagagacagtgagagacagaagaaaaacagaactagacatccacccttgagcgttagtgactaagagtctccctgtcctcttgtggttttcgttttaatgagtgcaagtcatggtactaagggccaaaaacattgtggtgataatctgcagctaagctcttctcagctctcacaaatcccccttttggcttctgcatggaacttggcagccctgttttaagcactgttcacatttggcttactgcatgcatcccccagaagtgacatgagcacttcatcagtgtattcactattttaagatgtatatcagaattgtgtcatagaacctgacaaagataacaatctgcaaacttcctgtcccaaccactagccctctatttgactaaccttctaaagcatgtgagaaagaagaagaggggaaaaaaatcaaagttatgtagaagaaaatgtgaactcaaataatctgtacacaaaatgttgctaaacaatggttaaaagataaccaggggtgagattgccaaacctaccttgagaggctaaccacgcagtcatccacatcaattttaactatcatgtgcctaaagagagggtaagccagtctattgtctattgttaccagctctttccttcttcctcttctctcctccaatcatcagatatcatcgtagcttggtgaacccccaaagtccattctcctgtctcagttcctgaacactgcacatttatctagtactcaactatccatttgtcatcctgcccatgaatatgaaattcgcaccacacttatttgttcttttattctctagtacttctcattggaaaattcaaactgttactgtcattgttatgttgtcttttccctgaagtatcactggagatcctctgtctcacagttgtcactaatcaagtataatttcaaaaatatgtattgtatagaaagttcattaggacgttataggtgtcacctatcataagaggattgcttagttaagtagtagcaatagattacgaaaaaaatcagaatcaaatcaatatcatgtgtagctatatactgagtctctgaaccaacagtatagttatggagtaaaattatcaaatgaatatgaggtattcagaatatctaattataaattatagaaataatgatgatttctaaaagatgcagtaagtcatgccgttagtaattgtaaccataatatgaatcccataaaatttggattttatgtttgaaaaaagatgtcaattaacaaaatttaatatttaaattattcagtgatagaacaaaggcaagactcatgtccctttcatttagaaagcactgatttgaaatacatataaattgtctggatggagaactgggaaatggcttagaaaataaagtagttactgtgcaagcataaagacctgagtttaatccacatttcctatgtaaaaatatgggtgtgacagtgcacttccatgattacagcatggagaggcaggaacaagagggtcacaggagctttctagacaggcagaatctgttgaatttggttgaatctgggaactccaaactcagggggaagccttgactcaaacaaagatgaagaagtgattgagaaagacagctgatgtcaacatctggcctctacacataggcacaaacccatacaagagtcagcaagcacatgcacaaatgtacacatatacaaaataagtacataaatggataagttttcaggatgactaagctcttattatgtaaaagtaagaaagaggattaaataggctattgtgaataaaagggcacagataatgtaagaaattacggcataaaaaatacgtctcaaggttttgtcaattaaattcttactttatgccagttttattttttgttctttgtcaaaatccttgagttaaaatttacatgtgatagacataaaatatagacatgaacattaaaatttttccttgctacctggataggttgctgatttattttgcatgaattgtaaatttctagcacgtcaaaaattcaaacattttaattaacagtagtaaacagaaaagcattttcacatgtatctgcatgcatggttttctttattgtgtttctggcataggcaagccttgataaataatcatcttgatcatttcatttgttataattaaacaatgaagtgcatcagtagtagtaatcagcagataatcacatcctggtttaattagcatgtataggacacagccaagtatctctaatgccttagagtgtgattataatatgatggctgtacccagtaggttgtctaatttccattgtaaagatatgtaggtttttggtaatgaggctattctaaaaatgagcatttctctttctcaaacacatatctcaaacgtgatagtttgggatattcaacaagtttgatatgaaggttatctcttgcttctaatactttgtctttatcaatatccaaagacaatgataaaaggtaataagaaaaattcatcttatctaaatattcctcaatttatcaagattaagaattcaatagaaaaaataagccaaggagtaactggatattttattttgctattatagttttgaaatttcagccaaatatttctgctgccaacacagatagccatcagccttgtttttaataacttgacatggctaaattgtttattttcaccctaaaaagttagcaaggctacctcaggaaaacaattaaatagtagtggtaagtttgttgttacatcttttgtgtgctaatggatcagtcactttcttaaaatcacctcattaatttagatacttgtgttgcctctgtctaaatcaaaggaccaattggtccacttgacatgacttttgtatctttgaatgacaggcacttacaaaccaacaacttgagatcactgaaaaccaaaagatgtggtttgttttggaaatagttacttgtatttaggatgtttgaggaatgcagaatccaataacaaccatagctttttgtttgtgtgtgtcttttttttttcctctctttgttcttcagtgtaacagtgactacgtgcctgtgtgtggctccaatggagagagctaccagaatgagtgctacctgaggcaagctgcctgcaaacagcagagtgagatacttgtggtctcagaaggatcctgtgctacaggtatgcacaaatgttcctgaaatggactgtgagttcaatggttgaatcctattggggaaaaacaaaaaacaaaaaataaaccacaaaacaaacaaaaacaaaaaacaacaacaacaaaaagcaaccttctcgtgcatgaacttgggactccatttattctttggtacatcatttttgtgcatcgtgatttcttttatttcaaatatgtctgtaaaagagaggaaatgcatcagttcacaactggtatctttaaatacatatgttgtttactgaagtgcagaccattgaataaaatataattagaaatctgagttgagtacacacatatcaaattcatagatgaagtttctgtttgtttaatcgactgtttatttgataaacagtgctatcgtctagggttgcacgtttgtaggttggagttctgaagttaacaagttatttttgtggagacactaatgttagatttttaactgtaacatgtgctggttaccacttagcagatcatactgaagaatgcattggcagtgtgaataatttacactaacatctgtctttctgacacagttaaactcaggttctacggcactctttatttgtgttgttttaagaatgatggaaggcagtaaagaaagaaggaaggaaggagggagggagggaaggaaggaagtccacaattgtcttagcctttgggggtactttgttctattttgctgtttgtttttcttttccttcatttctccctctccccctccctctccnnnnnnnnnnnnnnnnnnnnctatggtgggggtgggggtgttacaacccagaaatttacaggtagagaaataaagcaacaacagataaaaagaaactgcagttaggtgaagcctgcttcagaaagcagtgctttaaaggggagccaagcccagcttaggccatgggcatcttaagcacctgccctaaataaacaaataaataagtaacacatcaagatcactatagttactttaaaaactctctgaaggtcatagttcaggaaaaaaaatgataatacaattggaaaacttctttcaaaaataacgaaacagcattagggaatcttctgtaaaagtccctctgggataacaggtttttctattttagggtgtaacatgagaagtgtgtgttgttgggtgggtagggtgtacaatgagtaagaacaaagtcttgggttccttggaagactgactgtcttcagtctccttacagttagtggtgactgatctttgaaggtctcctgctcattaccacagtttccagaaggagcaggggacaatgaaacaggagcatttctcagctacagtgattttgattttacagtcctttgatttttgtggtggtcttttaaggggtcttttctgaatgattctttgtccttgcaagttaatgacctatgaggataatggtcaggatggcaaggtcaggatggcctgtggtcagtacagatttgccagaacaggtcattgctgcttggcatggagtaagatgtgtgtgtaaaagtggaggcaagagtgcagctcagaggggaggaagaggaccagaagctagcctcagagtagggattggggcataggagaaagcactaagaaacaaactatgaaaataaatcagccatccataccaaaggacaaaacaataaagaacatctactttaaaacgaatgaaacagaaatacatggaacctttggacctcaggggggtttcagtgaacactgcagggatcagtaaaaagctttgtttatatgatgatccaggagggcagctgagaaacatgtacatcacccagtgagcactaacaggtagaaagcagtcatatcaactggaccagtagctgtggctatggcaaatggcatctggtaccaaaaatgatactgttttctcccaacctctgaattcctgtcagtctacacagtctgattcattcaagtctattcatgctagtctccagtgtgctgcttttactatgaaaataaatacttagccaagtagaaaatttaatcacaatcgaagaagctgtccttacctcatttgcatacttagatttctacaggatttaattagtcagccagtttagctgaatgcatcttctgttgactagagaatttaaaagagttttggtctgagcagtgatagagaaaccaagtgattagccaggcctgatggcaaaaaaattgtggatattacttttcttcatagttttcccatttatttttaatgtttcttgacagtgagttgaggttgcaagttctattctctggaaataagtggctggagaacattgaaattttaatctagaacgtggcttccttgtagccagtctcattgtcagcttaagttcttgctttgcaagaatgcagttgacgaagagcccagattcttgtccaatcgtatcccttccgtgccaggatgtgtctgcctctctgcaactttcttagtctacttatttctggcttgccgtgatgactcatcctacaattgagaaaacattaaagcttcccacaagtatttcataatgatgcagttgactacagtgcccattttcccatctaaccctcttttcttctctagctatttaatctgggtcaaatcagtcactaatcaagtggatggaatgaagttttagaaacgcatgtggaagataaaatccaaaacactcctattttttccctgacttttcccaaacacatatattaacgcaaaagcctaaagatcaacaggcaagatgttttctcaacattttaatgattgtacttcagactgttgctcacacatttaaagcaagctactattcacttgttaaacggaaggaataaacttcggaaggctgcctaggattccgcttgtcatttagcaaactggagcctgtgaacatgggtgccaatctctttgtgtgtatcatagtcaagtttagagggacaagcatcacattgccctgcctcatggaagtttctgatgttagtaagaaatgagcaacagacttcatatgctgtaagcatacagacagaatgtgatagtcccaattcaggacagccgcgacttggtcccttcacgtaaaagtagcagtgaagtaagctttcaaattaattcaaaaccaattaaaatattacgtatgaaagtgtgctcagaggaaacttagcaagtgttggccattcaagcacgattctgccccaaagaagcagtgttgtaactaatgagtgtgttctaactggcggagtatgttcttgttgcaaaaagaaatgtgttgagtcattcataattgggcattattaaaacgtcaaaccaaaccctaagtgttggttgtgtatttgttaagaaatatatatcataaatatatatttgttaagaaatgtatatttaaatatatattaatatttaaaaatatttttatattttaatgtataatgtataaatatataagaacatatacttaatcttaacacatgtccatatatatacaaattgtttccgtcaattagcttgcctttaggtaaaggatacgacccaaagtcatatggtcagacatgatggcagttaataaatggactgcgatccttgtataatacagtgttagttactctgagtcgccactaagacttactgttccactgcgttccgccatagcactgttaatgccacaaaggaggacatgttttatagactgacccattctcccccaagtgtcagctctgtggattttcatccccctggccactctatgtagtgtgtctccacaaaatctcaaagagcccagcacgaacaagaaatgttttacattaattcaactaaactacaaggaaaaacctcattgaggaggatttttatgtaagtcttgaatcctggatgcaattccaatgtaaaatagtaatagcatggctgaaggaggctaccaatgttgtcttatgacctaggattaagagtagaaatgcacaatgggatatcttttgaatgcaaagaaataagcagagaacggatattgtcttcatttaggaacagaaaggaactcaaaagtttggctcagagcagggcactgcatagttctggaatttgtgttcttagaaagagtcaccttcacctgcttgtactgactgggaagggagggcaggaagaagcacggtaagaaacagtgcaggtggtgttcctgtgccagtgtctcagcgtctgagcgtctcagtgtctgctccactacgagcacagagactaagtaaactcacatctcctcatatcagcagtgacgtcccggtagatagtgtggcatcgagcagcccctcatccccacaaagtgctccctttactctttttttctttgtttataagcaatgtgcaagaacggtattgtgtacactgtttagttgcgaaaatgcagcgatagaagcctctcatcatgtcgaagtctccagttcagcctggtcaaagtgaaaccagggaggacttcccatgctcgagcaggactttatttccccaaagctgtatgatacaggtttcataaaatttaagaagaaaaataatgtctcagaaattagattaaattgagaaaactgtatattagtagatgaagtgctacaagttttcccatcaatgacattttagcattgagatagggaacaagctaatggtgcgcgatccccacacttagcagatgaaggcagggagagcaaactgtaaatcatcctggattacaaagaccctgtctcaaaccaaaatcactcaaagacaaccaagagaggaagcctaaccttgaaaactagttgtctaatctatttttcaagtgagtatgaactgttttctcttttcttcccagatacaggatcgggatctggagatggaggtaggaggagttgctgctctccttttgtatttggatgtttctgtgggctgttgtgggttcttgttgatagatgctattccaaagcagtcatctaagagaaacctaaattttgggttttaggaaaggcaaactacatgacaagttgtcctactagtttagttgctgtatatgccatgactatttctcggtctactcacaaatcacacccatctcatttcacctcctccttcacgcacttccttgtgtgttgtgctgagtctgaaacagatagtgtcaaaacacatacaaagttgtcgacatgttttgtaagacagaaagacttcaggaagaaaatttttatatatttcattttttaaatgcataagaatgccctcaaacattaacatgtaaataacttcctatatcaggattttaagtctaagtcaagacatattagttcataaaaataaaaagatggaaacaaaagttaagtcaaaggtatcatgacattatcttttcttccctgatgaaatcaatacactgttaattttactaaaataagatatatttttgcttgctttcctttgttttgtttcacttgagaaggacccgctgtgtagccctggcagactttgagctctctgtgaagaccattctggtcttgaactcacaatgatctacccacctctgcctcaaaaacaaaaacaaaaaacaaacaaaaaaatttaaaggcatgtggatgaatattgtaacataacatgcccagccagctaagaagtaagatatatgttttgattccttaattctatttgaagaaatatgtgaaaggtagaaaccttgtaagtcccatcagatatgtttacaacggaaggaatactttatttttaccttaaatgtccttataaatatcctagatgcttttccaaatgaaattccaactaccacttttatctacacaacacaaataaagatcaaaacccaatatacagttataagattaataaaacaaaaatggatttgaaatacaaatatcatcgcaatggtttcttaggctgtatacattaattacattatgattctgtaaatagggaaggtgatagaactcagaaaactttgtgttctggaaactagagactcaatggtacacattttatgtagcttgggaaacttgagttttacagagagaaaggtttcactaattcaaataagctacacctggagagcacagagttgcacctcggagcccaggctaaagctaagcagtagtcaatactcaaacgcagactatgcttgacggcacagggcttcggacttccatctcgatttcaacgggctttctttacttgtaagaaatcaaaatgctccttcttctcttaaggtgatgaaaatagtactcaagaaatcttcccagcggctttgaaaggagatgcttagaaacattaagtcttcacataaaggtagaaaaagacagtgcctttagcttttccattgaaatttttaagtttcagtccattttttaaatcttgctttgatagtttcacgcaaaaattctgtacagtttctgagcatttagttttgtttgcggactaatctggcaattactctattgagacctaactattccactgtgcacccaacaagtcttgttcttttgctaacatgattataaagaaaacagaaatgattcacagaacacagagtatcttcattgtcctgataaatttccatcacacattttcccgccagctgatttccccacccagcatgcatcttgttttgcttttaaaataaaatttgtgtggtcggtgcaggtgctgcttcctaattttcagcagttgatatcagcataggaaaatggaactaaagccatgcttactttgttatttagttggttccttgtgctttcctttgaccagaataagaccttttgttttttaaggaaatcattttcctctcacaagtatgcccttggcgacatggttcataaaaagagggatacaccattggaaaacacctttcttttttcttttcaccaatttattttttctcctatcctgatgcctgtgctttttctttccccttaactattcttttcaattatagactccttaatagtagtaatttctaagcttaaaaaaatagttgccactattgttgagacagaggctcactttggaaaaagtctggcctggacagtctcactaagtaggttgatgctgatctttaactcagagcatttctcctgcttctgcctcctaaatattatgtctacagataggattttccatatctgaccgaattgatcaataagagatatttacttttaagctatagggcatctaaccctttgaatccagggttctcaaccttcctaatgatgtgacctttaatatagttcttcatgttgtgatgtccttgaccatataattattcttattgctccttcaaactgtaatttttctactgtcataaattataatgtaaatatttttggagatagaggtttgccaaaggggtcacaacccgtggattgagagatgcttttatgaattctgagttataatctttgaaataataaatgttctgaaaattttagcaatatgaataaaagttttaaattggaagcaaaactgggacattggccaaattgcttttctcctgactcataagttattgtattctatggcactaacaagtctgaattttacttaaactcttaaatagattagtaactccaatgacaaaatatactcaagctcagatctcatagcctttgggttgttaaagttggatttggcttactgactctaatatgcttagaattggactgactttttaataagagatccaaaaatattttagtagatccaggatcttcctttgaatggctgaacatgctatgcgttctagagtgagtatatagggacttgattatcttttcgaggaccttggaatgtcgatggttatttttataatatataatctgacagaaaggtcgtatgattcttaagaggagtgcatgggtatgactagtgaaataagcaaacgtggctgcatacatttgccatgggtaactgccatgagtaaaatgcttaaccctaaagaataaatttatttttaaaatacatcaatttttcctgttttagattggcttatgcttttaagtggatgagtatcagattagcaaaaaattagacatgattactttaagaataatttaagctttattgatatgcatagaacataactgtcatttactttggttgaagaaaattattatcataattaaaattcgtacaaggtttttataagattaacaggttatggaaggttttaactattttactgatcaggtaaaacattagaaatcattccatttgttatgaaatgtgctcactgtgtttccaacataatctttgctttgtattcatccacaaagagttccatggaggaggataaccacctcacatgaatagtaaagggtagttttacccatttcagcatctttatccttatcttctgctgttaaagaaaacttatttttaaaaaaaagctttacattgttagttttgagcataagagttatggagttctatgctggatcaaaaatcttttgaaaagtcatgagcgtcaaacattccgtatgaattggtctgtacttggaaaaaaaacattcaagatgaactataattttctgttttacgtgcaagaaggtagtgtgtggaccacacacctgagaacttgagaaagtggctgaatacgattagcaactcaagtgcccttagtatgtatatggagagttagtgttataaatatgaaagtggttgtgtaggagggatgatcacctcctgtatacccacagacttgcttaggcaacaaatactgcaagaaggaaaagtatttaagcagcctcctctagagatcgagggctgtgtgggtgctgagaggatcattttaagctctgcttttctgcatctttaagctatattataagcacaaagttttgaagatttttctttcattccttttcaaagtacttttggattgcttatactctcaccaaattcttaaagataaaagtccatctacaaaatgaaacccactcgtagcatctataatatttgcagatgtgctgtccttttatgcatgatgcaaaaatccataattgacttttaataacatctcctgagaggtctacagcatttgtagaattaaaaatataagagatacatgtatagacacaaaggtatatttttatttcatagggacaaggatgttcatagccaacatacggtactgtagggttctgcacttctagggaaacttttttgttttgtttccttgagaggaagtttcattatatccaagacgacctcaaacttggtatcctcctgcttggcctcattttctgatattacaggcacatattaaaacatcttgccaaggtccccaatgaagaagctagagaaagtacccaaggagttgaaggggtttgcagccccacaggaggaacatcaatatgaactaatcagtacccacagagctccttggaactaaaccaccaaagaaaacacatggtgggactcatggctctagctgcatatgtagcagaggatggtctactccatcatcaatgggaggagaggcccttggtcctgtgaaggttgaatgtcccagtataggcgaatgtcaggaccagggatgggagtgggtggtttggggagcagggggaaggagaggggaagggaattttcagaggggaaactagaaaaggggataatatttgaaatgtaaataaaaaaaatatctaataaaaaccaccttgaagcctagagaacttttaactagattaatattagatatgtacagtaacaagttgaatttatagctgatatttgtacagttcatataacttttaaagtaattaatattgtgatgattttaaagtagaaagccggttgatattttgttttgacttagtgaaaaaaaatctctttgtcagttgcctttatacaatacctatcaggtttgccatcgttaaacctttacttcatacacaatttggcaccaacaagaaaggtttacatcacaacaaaatataaattacaacctctacagctgaccaaatgggttgataaaaactattgtaagaagttggagagcgtgaaagttgttttcaagccatctttttctttctcatgtgaaagtggttgatttgaagtcttacattacctgggcacagtggcatgatttctgacatctgtgatgctagtcatgaccattttattctgctcagagattacatattaattctccttactgcatacaatgggaaatgttatgttgctgattatgaaagggaataatcccagcacaagtaaaatgttaaatgcactagagataaaataaatgaatattcattgcataaaaagcttttatgtaggagtaagtaattttcttttccgtgtttctgtactcctccctggcctcagcagcatttttgtgccttcttcagttactgtcacagtcaagtctggcaaacacaatttacttgggaaagatttttccccccattgggttcacactgcagccagagtctgacagataacaatagtaagcagctccagccaaaagagtgattcaataaagaaattccaccaattgcctaaggtctgaggtcttccaatgcaattcatctagggagtaatcagaagcaatgctctcttccatctcccacacccaagagctgctgctcttttgcctagaaatgagcacataaccatctaaccctcgattgaaatcatatctcaggcttttatggcttggggcccatgtttctctttacctcaaaaaaaaatatggaaatagactaaggaaagaaaagcagaatgagtgcagaatatgtagtggatgccaatattggaaataaacataagaaacaaacagaaggggagaaacaatgagagtggtaggaagacaattggaggggtaagaagactttgctgtgagcgtgggtggagggcagtttgttttcacatgtgaatatcattttacaagtagaaccgagtgttcttacaatagagcagtgatagtttctgaagttctagattgcctgggagaatgaaatgaatactacaagcttttccaggcaatctaattgggtttataaaaattacagggaaataaagttagtcatcctatagagtatggaagaaatgagtttggattcagcatccggagactggaagtctagatttttaactggcttgaaggatatctattaacatttctttctttttttttttatttttttactcttagtctccttagagagtgattcatcttattgtttaaactggctcataccacttagggaaagataatcacaacaaactaaaacctagaactttgaactctgggaaattagaactagagttacagaaattcctgctacctttttctctgactcctattttctctgagaacataatttctatgaggaggcaaactagaataacaagttgtttaactactaatccatggtttaaaatggtgactaggtgtgatggtacaagcttgtggtcctagcatgttgaaaagctgaggaatgaggatcaactgtactacacagcaagttccaggtcagcttggcctacatagcaagactctagatacacgtacaattacagtaacaatagtattgactctatgataataagtatgaatccaatagtttcctatagttagggagacagtcaccttttcatctagaaagaaacagaaattacaggattgaaacatccaggagaaactaaaatcctacaagatatggaagaaagaaaactgatttaaaatctctaaaaattaattgttctcaaaattaagtggcaggcatattgcctccactgaaaaccaaataaagatgtggaagttcaatttggtctattcaacatatttacatgaaaatattatcatcaggccggtaagcactgttatttttctaagtgactttttgatttctagaatataggtaagaaattgtaccccagttcttactaatgtccaaatatgaattagttaagtcagggagcattcttatataattagtcgtaaacattttatggtttacaaagatcacagtcataatattaataatagatgcaaataagaagaaagaccatcctaaccatagcccagtgacaatatctatggttactcacccagtcctcaaacttcaaaaaagaaggaaccatagactgcccatgagagcagtgtttttcagtcactacaccagaactcatttcctattgtaatacaaataataaatcttacccaaactcttagggaaatttattatcccattttcttagcctcttccattgtcactttttctcttgaaaacacctgttccttttgatgcatgggttgagtctgttgttgtcggttacctgttgtgctctcgctctatacattatgattagtatctattctcttctcttattttctcctctgttctccatctcatcttctaaacattttctctctatagtactgggtagcctttaaggttttaatgaaatatatattagaaaaggcagaggttcacagtacaacttgaggatctcggggctgtgtagactgtattggaactttccatgtctagccgtactgccttgagaaagttacttagatttgtttttctcatctgtgataggcaaggtttttagtcagagctatcgtgaggttaaaattgggtgtgcctgaagtttagtgaaggatgccttagaataatagcatctctacaaaggaatggtgtcaggataaaaagaaataaactataaattgtacagtgagataaaagtcagagaatagcccaacctggagtccccaagttgagaggggctctgcgacttatcctcagtcaagatgatgaggtcaggcctttgtattctactactgatcatctctcacatgggcaattcacaaaaggtgctgaagagtaagccagatggttatctttggatacatatctcacacacacacttacatgcacacacactcacaacattctcacacacatactctctctctcacacactcactctcacacaatacacactcttacacactcacatagacttatacttacacactcacacacaaaaataaacaaatttaatcttatcttaagacggtaaaatttttgttgtttggttgttgttgattttgaagaggctattatatgttctccaggttctgtatgcgtccttgtctgtcctcgacatgcccatctgctacttttctgatgggtgttgcctttagtgactaaaaccctagtttttatatcattaactaaaacattcattttaataaagattttatttaaaattaatttttactgatttgatagttttaagcaagcaaaaaattcttttatttccagacaccatttaagacacaggaatgtctctgcatgctgcaatgtatacctaacctcattgacttggtttcaaatttggatttgaaaatatagctttttttttaaactgtactagatgtacatacatattgtaccatatgatttccaatgtgtacttaacaaagaacaacttcattttctctggcaaattatacacttgctgtcgcagagggagtctaaaagaaatccaggaatacactgaaaacaatatatttaaatgttagcatcctttttccacaagtgaagcctcaagagttataccagtactcctcagttattgtactgattctgaaaacaaagaaaacaagaacaaacaaacaaaccatttaactgtggatttgttggtagtctctctcagagaaaaccaaaggaataattagctgcatatgaaataatgttggctctgagaagctgttctgtggatcaatcatttcaactggtccagtcttgctgggttaaataatattggctataatgcaaactttccctctcatttttccagttgtatctactgttttattttagggcatggctaattgggattttatcctatcattttcttcgcttggggaaggcagcagacaaaatatcttattggtactgtcagttagaagaggcaaacctttcgatatctgcataaaatagagtatgatagaccgtttggtcccagctctgttgaggaaagtttgtggtcatgtgagcagacagtggaagagagtgagcaccctccagtcactgactgtcccctccaaagattgtgacacacaaagcaaactaagtcctttagcaagcatgattcctgacatattgatttaaaatgcttctggcagcaacttcctgacacattgaaaacaaagtaccatcatttatgacccttcataatgcagtatgtgatataattcttaagagttggggagttttacaaagttcagaattttgtttagttactcaaaagacaaccatcattccagcttgaattgggcagtctttcaatgtagatgtccataaactctcctagcctttcattggaaatgtaaatgaggaaaatacctaataaaaaatttttaaaactcccttatgccaggatgtgtcagagatagacagcaagttcagcgctatatatcaacacactgtggattttctatggtgaggagttctcagatccatgtctcaagaccctccatcaatctcccatcttagccccttggcatctcctgtctataacactggaaaatgcttcttagcaggaatatctgctcccacatatcttactcctaaaaatttcttctaagcacactgagaatatgcatagaaaatgcttagataagtatattattcttttgcttaagactcagcaatggctttcccatcttctttagattaaaacttagtggtcacgttaggttttacaaaaacttctagcatcagtctattgtcttctccaacatcagcatccgtcttttttatcttagacttggctcatgagtgctctttttcactagtggagaaatccttctcatgtactgcctaaatcctactcatgtccaaaaataaactgtagattatagagtttttcaggatttccatacattctgatcacagtttggcaacttatcaggcttacaggggccttgtcgagggcttcctttgaccttgtagaacaaaggccaaaacactggctgatttttttaaaattatataatcatatatatatatgtatatatatacacatacatatatattatacattatgtatatacatataattatatacatgtttatgtgtatatataatatgtgatacgttttataaaatcaagggtatgttttgtagagagccaaggatatgtttgagagagcttggtgtggtgcagtgggaggggttgcctcagaaggcccatgcttaggcatcctccccgtgaggtaccagccatatgatgggtatagtatagaatagagtttatttgggaacatgaagcggcaagttgagaagagagtagaggcaaataaagagagtaaatagaaaggtgaagaaagacagaaagagagaggaggctgatcagaacatgtggagagatggtgataggggaagaacaaagagggagaagggggtcaaagaaagcagagggtgtcagacatagaaaaggggcagagagagcaaagagaggacaaacattctcttttatagtaagccaggcctacctggctgttgctaggtaactgttgggtgaaatctagaagcaatgctaaagatgtgtgtgtgtgtaacattgtatattatatacacacatatacattatatacatatgtgtgtgtatatataattgtatatcattatgtatatgtcatacatatatacatgtacatatacatagtgtgtgtgtgtgtgtgtgtgtgtgtgtgtgtatgtgtgtgtgtgtgtgtgtgtgtgtgtgtgtgtgtgcatgcttgcaaaggcacatgtgtgtgcatggatccataacacagtgcacacctgtagaggtcagaggaaaacctgaagaaaatggttcccttcttctgtcatgtggaattttcgagaatgaaagtcagtcatcaggtttggtggcaggagtctttgactagtaaaccatcttactccttgactgtcttgtgtgtgtgtgtgtgtgtgtgtgtgtgtgtgtgtgtgtgtgtgtgtgtgtgtttgtcccttaatctactttagctaagacctctgaactttggctattgaacatctggaaggccatttgcaccagttcttaaaagaaacccatgaactacagttttaacttttgagtgtaaacatttagaaaaagtttgtataaaaatacatagattttaaaataaatcctagctttgttaaaaactcaccttcttaaacttcttgattgaaataaacacctcttgtttttgtgtattatatccacaatcacagtcatggaaacaagctatgtgtaagacctatgaagtctctctaagagctttctaagacaaccaaggccttgatagtaatgtcaaaaatgccctcattcctgaatgtttcctttcacattgactgctatagtttaagttaattttttgaaggagctaaatatgaaaggcttgtcatactaaaagaactatagatctattttaactttaaatattaaatagcagccacacaaaaaattactgtattttccctccaactctctctttttaaaattctctacaggtgtcttttgtctgagcagagcatggtagccatgcttcagttttagttatggtgtggaaacatagcaggagaggacctgaggaatatggcacagacatggaacaaagttaaaccagaataagtcctgagaaataataaattcggaaataagcaccatttttcatacccaggacctaaaggatgtcaagaaaaccccatggaaacaggacatatctcctttgaaatttatatacagtatatttttactagtttcacagtagtatctccatgccatgttcattctggttctccatttccctcacatgtcctttggacctgacagcaggatgtggacctgttcacttgtgatccatttcgttttccaacaagcagtgtgtgcagaaaaataattgaagttagtctaccactcaggttagttagttttgaggtaattgagttgactttgccctgtgagaatactttattcaatagccaaattacttattaaaataccaaatggctttagccaaaaaaaaattagtttcacttggaaatccatttgatgctttcatttgctttggcattgaatcagtggagagtgtggttgggtttccaaagaactaaaatggataccttacatgaatgtattctgacaaccaaataatattacttagaaaatgggacattgattattccttacatccagatagtctctctacataatgaaagaaagtgtagcactctgtgatattctgctttaatttatgaaatagttaaagcacagggagaatggagcctctgcacgatgtgagagtctagtacaaattattttagaggaagcatgtcatcattgtcagactggaagtaaagactatccgcacagcctgagagaatagctccagtactggagtaggtgtctggtgaatgcaagatgggcacagagacaaatgtctctcctaagtcctctgtccttttgctcctttgtcaaccaacttaaagtcaaagcacatatctcatcctcatgtttttctctcccatcaatctcccttcaccaggtgaagagtgggacaaggttgtaatactgtacatagctagaaaagatgcccgagatggataaaataaaaggaccgtttagaagaattacaacagcaacagaggacttttcaatacaaaatatcacagagaaagcagtgtgctcagcattttgtagaaaagtttcagtgttctaacggtagaattttaaggtgtttcagagttgaaaacactatattggttttatacattttaactcttgatatttcatctatattaatgatacaatagcactaactccatttgattgttgctttgcttgcagaacttcaattgtcagaacaacaatgtgctctaaacacatttttcctagttttactaacacacacacacaaacacacaaagagacacacactttgtcactcatcactcataagaactagcattgaatgttgccagtatatacttcattaggaagcataggcttcattcttagcaaacagagtcatctgagtcaattatctagagtgcagagtgagtctagctagacaatgtcctctaaccaggcaatgcaaatgggtttctgaggaatagaaaaatctgtgggaactgctgtgtcagaggctgtccctgtaagtgagggtgacttgactcctttttaaaattctcatataggttgctaactaagtgtggtttgcctcgaatttttacacttttagcacttgataatcttgctccagggaagaaacatgactgatcactttatgccttactcatagatgtgaggctgcaaagtctcacaggcagggtggtgtattttgtttgatctttctctcactctcccattcctccctccctctccctcctctctctctctctctctctctctctctctctctctctctctctctctctctctctctctccctctctctctctccctccctccctctcctctccctcccccttgtgagtgtttacacatgtgcagattaaaaggatatgaacaagttatttttaactttaaaaaatccattcattatcttgatcctagttcttcccttagccccattctctcaggccctcattacctccctacccccctcacccaacttcatgttctttctctctctttggctcaaaagacactcaaattctaaaacaaacaaataaataaacaaaaaatatttttgaagattatcagggaattcatttgtggaatttttcttcctgacagccaggtatcaacgccttggtgaaagagagttaaagcaaaatgtttttccatgagacatttccctgggatgtggtaccaagaaggacttgaactagtgtggtattctgaatgggctttttcaaatgcttgtagatggtatatgagaacacacaattgcagacattggaaactctcatgtttgacaattctcctggataacaagcatagaaaatgctaaaacgaagaacagcaaggcgctaagttcacacttcttatgtaaatgtggaaatactttacttttcctagctagttttctaatagtttgtctttaagtgaaaataattattgatacaacatttctgatccctggttctcctccctgaactcctcccatatatccaaatccctcccaactctccaccgattccactccaccttttccttctctttagaaaacaaacaagcaaacagaaaaagccaagaaagcagaataaagaaaaaacacactcaagcaaaactcatgaaaacctgaaatttcaaacaataatatacggtcaaacagccagcacttggaaaaaaaaatgtgatatgagacaaaaagcctacataaatacaaagtaaccattgaatttacttttgttggccacctatgctgggtatgggtgcctgcccttaagtgtacttaatattcccagtgagacaccagtaaaagatattataattattattatttcgcaagcttgtatcagttggagaaagcttcctggggaggatgaagactcataagcacttccctgtctggacactgggaccccatccagcttgaacctgtgcaggcccatgtgtgctgccgctgtctctgtgagttcatatgtttaaacctggcatggtagcacaggcctaaagtcccagcattctgaaagatgagaataaagacgtcacatctgagagccacacaggagcatagagacattctatttgagtaaacaaaaactgaaaggaatcaataatcattgcacactttggacagcactactcctgctccaaccatttgttttctggctgctgtgttctaagtagagtcctctctgccacagtgggttccagagcatgtggagacatgaatagctggcctgcctactgacagtgccacttaagcttcagagaaaaggtattttaagttagaattttgaaatttaattcctatacagaaatattcttacaacagaaataattctcctttttctagatatttcacaaaagtttacttgtctttgtgcagatttgtggggcaattctcctctgatgatattgtagaaatcaggtatgaaggagggtgtgaagtggtaatatgagcaggaggcatacaaacattttatattttagccaaaattcacattcagagctatttagttacacgcaacatatttgtagtttttattttttaactcttttagccagtaatcaagaagtccatctgacaaaacatgttagaaacactgcccatagcatcaggaaaaagaagccagtgtcttcattagcaaaacagctgtacacaatgacacccatgacattctggatcaagactctgaagacctgaacttacacaagaggctctgttattctacacagtgttccaaatatatttgtttattccaaaatttgcttttatttacttatgtatctgtcttggtaaggggagagagctcctgctccacttcccctctcaaccctgggaccctgtctagttgaaacctatgtatatccacacttgctgccatagtctctgagtagcacatagatgtgtgcttgtatatgttttactttgaggtcaacaatgtcaggcatcttcagttgctccccacttcagtttttcagtctcttagtgaacctggagtttgccaattcagttagagtgacctgtgggcaaaggcccaggaatctccctccatctgcctctttcgatctagtcttttggaatgagatcagggacacatcccttaacaaacttagccatatctccagctccaaggcttttcctccaaatgtagatatatcttcctgttattttctgaatagtgtttatcactaaatatctcaaaattaaaagtagtattcctaacattcttagtatacagaatttatagttaatgaaaatgaaatgacttttgaaaaaccttctaatttttgtgtctctagtataataccatgtggaagaaaaatacaatggttatttaatacttcttgaagttattgggatggcaaaagtgtaaataaaaaagtgctccaaatgttgcagccgccagcagctcgcaacatgaacggttcgactgagaaggctactcgagctgtaagagaggaatctagacggggcgaaagaagaaacggagccaagacaaattcattctgatcaaagctcaaattttattcttgggacactagttataaaggaagggagaggggacctgattcccgccgaataatctcgggtccagtagaaaggtgcacgtgtgtggctcctcaggttccagcagtgggcgtggcagaacgaatgagcaggaagctccaccccgagcaagcaggtttcaggctgggggaggggagactacatccaaatagtatgttaatattaagcatgataccataccttcagattgggcaagtaaaaacacatgggtgcatattatggtctgattatttatagtcgtgtattaagtaattggcatgattcttcagggaacatagatcatctctattttcgatggttaaaagaagaggcacaacagtatttgttaaacattttcatatgttgtgaggaacaaagctagcttccttgggctctgaaatttctttttacttcattgtttcatgtgtaggttgttgccataagttgggaaattaaaatagaatgttgcaatatttcatattaagcattattaatgtgattgggagtagttattactattaaatagattttcataaatcagcaaatttgtgtgatgtgacttggacataagaatgcatggaaggacacacatacacacacaatctggtagtattattgattatataatatgcattctatttttctttgtactttcttcgtattggtgacattggctatgccatactttgtgccaaccaagtttaagagacaagaaaaaactctgagtaagaatacttcagagagtaacaactagtttacagaaaataaaacaggtgctataagacaaagtatctctcttgggagaaaaaattcaattttattatgagaaagagaaatagcaggtaaaggtacagaagcaggatgctcccgacaaatgccaagtccctacgtgtagtcacctgtattccatgccctgtagtcttgggcatttggatacttagttcctaattggtgcatccttgggctaagtcctagttgtggtgtgtcctaggtcctaagaggtgtgtccttgttggaagaggtatgtcaccagaaagagagttcagacctatgcccactcaggtatgctctctctgcttcctgctttctctgcctcctgcatctgtgctgcactcctctcatggattcttctccttctggaattgtatttctcagtaaagtcccttctgtacgttgccttggtcacagtgtcttatcatggtcatagagaagtaactaatacactctgcgagctccttgggaaatacagggcagagggagttcagcaccacagcacttgaccagaaaaccctcagctgagtcgtaaaaaaaatttgtattttcaccagggtcattaaaatgttttaagggcaatcttttttttttaatatgtttaaaatactgttcaggcctccaggtggagaataaattgtatgtgaagcaaaattgaagcaagatactaacacaaagattgccacagtggaacaaggcagagtgagtccacacaacctgagtgttggtcaaagggccagtgaggtggtaacaaatactttctgtccatttagatgctagtatgggtgtgaacaagtgttacttgccaaagtaaggaagaacatggatagtcaggaggtagatacatgaggatcaagttcacatcactatccaagtctgtgcaatgagtctttgcctgactcagaacaaaagaaaagtatgtggaaagggtaggaaggatgtcaatagcgtctttatctcatccatgttcgtcacaaatcaacattactggtttaattttaaaacacaaatatacttcataaagagcaccattttaagaaccaaagccctcgtgctgagcccaatatactcatcgaaggcaattttctcagactttgagatgcaaacacactgacgtgcttaggagttttcagttggttgcttttcaataaagcctgtgtagtctgacgtttttgtttttcatttactccttgaaatttatcatcaacagtttcagcatcatccccggtatggcagtaaaaggtaaaatacaataacagggaactcagtaatttggcttttaaatggctttatgcatttatgtgctatgtaggctatgtagcagattgtgataacagaatcagttataatcaaagtgcagccgtacaaatatagcagacaccttggaacagctccctttgttgatcgagacagagcaggagtgccatcttacactatattttctctataacagcatagcagcctcaacacctttgttgcgtttccgttgtgctgctattgcgaatgtccccacagtagcactttacctgtatttatcattgattcttgcacattgaattttctgctctgcggacaactaatttgagtggcttgaagtataaaacttacagctttccccttcattgtcccagttcacataacaatatagaagtcatttcccagtgcagaaaaccccaaggccctcagactttgttcagcctccgtggtgctacataatttattttatttctctgaagcctgcagcgtttcttatgtgctgttaagggaggggatccattgtcagtgtgtaagcatcacttcaattaagctctgctggcttctctgtctgcatgcgaatgtgaacttggttgtcttgagaatgacagttgtttattttactcatgggtgtctgatgctgggtggggacttacaggttgactcaaatatttataaacatgtcttttgctgtctttcgtggagactattctaaagttaggggaggtgctttttatattttgttgattgtttttggttctcacaaactcctttagctttctcttctcttgaattctaaattgcaattcttgttttatccagctagtcccagaaactataacctggtttgattcctgaagtgggaataatgttgtaccagtagggggagctcacaccatgcctattttatgggttggtttgaagttaattttgtggctttgtatccttaagggtggagccggtttcactttaaagccaacagtttctggggtttggaatataagttatttcttccagttgaaaagttaaaataatctgaagttgtaaatcttaagtgcgttaacagtttaagtctttagctaacgaatcgtcatactgtggttgaagttttcagattgctgaaatgtagaagctttaaaatatactaaaagttctctttctttgtgtacatcctcaaatcacttccttccaggaacagtgaccacaggactcgggctgaacactttttgtgctgatgactgtaagtcagcataaacaaggcagttgctaaccatggttgtggatgtaaatgtgagcttagttttttcatagatatccctggagggatagatacttggggctatccatatttctcactaaatttgcatagaatggagttggaaaggcatacagatctcaactagctctgtgctactcaagtcagcaaaggactcagagccagtatcattccaataccttttctttcccaagtttgttatttttgactctcctttgagatgttagcaattttccaaattctgcctgaaatttcagtctctaagatggtgaacaccaaacacctcttcatataatacgtttctgcaggcatctaatgtgacctcagaaaatggaaaagggagtagcatcttctctttgttccttttctccactcttgaacatctgtctaatgtcatgcataaggatgcccaagactctgctctgcccacagcaaactcatgattcagagactgtaccattcagtgaattgggagaaggaaggttccagcgtgtgttttcttcatcagaataagagatcacagttgtctccagactagcccatgaatttgactttcaaagcatccctgagtcaagacagctgactaattgctaacattatgcctcataaatctgaaagtctggactagaaagtgtgcgatgcctgcctcttgatggacattagttatgaaatcacctctgtcatagaattttcatctaaatcactgtgctgtttcataggttacatgtggttggaaccctggtgtagaagagggagagataatggagagaagaagatgaggtgaggtagaagaggctattgaaagtcggagaaaggttctcaggcatttgcgcgtttcctccgggtgaacgccacaattgtctagcaatttcctagcaataaaatagctgtcctgtggttgatgagcctttagcatgacagcgtgatgaccttagcctggattctcggattttaatagctctgtggttcccatagggtgaagctctttgctcattgctttctttggcttagactttcttctctgtcagtgatcctcctgtgtactgttacctcattagtgcttgattcctagagcatcatcactgctacaatgtctctttctgtatcacacatttattttagatggcataaatttaacaaaacaagttgttctgtggaccctgtaatcttacaggagcatatctatcacagcaatgcacagagtctaggaaatcacagatcatacctggcttcaactccagaacccctggccttgtagaacaaccacatttagggtcctacacatgatttggcatttgtaataaaatacatttcttttctaacgaagtctcattcattctacatgtttgagttccacaaaaatttagatctattattaagtttggtgtctgaatattttcctccctccactgccctgctgctgttctagtggctgtggttatgtggttctgtggggaatctactaatgatccttcggttaaatatattttagtttcccaggcagttccttagttcagcattgtaccagaggtcaagctgagtggctttaatagctttgtcaataaatcttacaaaatgtagtatcttaaacctatatcacttatatagaaattataatatagatattacagcaaaatactcaaaacatgagcagtatttgcaccaaacaaaatggtattacaaaccattaataatacttatcaggtaactcatatcttagccttagctgttgggttgatgttaagctcttgtgaagtcactcagtgctttgtgaaaccttcagttcccagattcattagattgcttggcttcaggaatgtaaggctcttagtgttttagagagcagttcaaacacagcatcttgacgtgatcttgggagactgtggcaagaagatggcaagtttaaggccaaactgaactggataacaaaaccctacctcaaaataaatcaaaacagagaagaagcaagccaaaaaaaaaaaaaaattcctttcccaaggcagtggcattatataaagactctgcctgctgatctcttgccagccatggagcctgtgcactactgcagaggcaatgcagatacagtgacttcatttgggtttattgcataccattaagtatcctttcagaatgcaaaaatttaagttcttagttcagacttatatgtctccaaaaaaaccaatttagctagtgactgtcattcatgaattgtacagttggtagactaggcctttgttcaagttctgggaatagagaagtgaaaaagctaacaattatgatagtgtgttggaatctggtgaagtagggcaatgaggtcaaagacactggaagaggaacaaagaccatcaaattatttactttattttattgaaacagatatacaaagttttagtacaaagcagcagggataggcagttgctcaaagggattcctataacagcactttgaattatcatattttattaaatgggagggccaggtcagctatgcaattgcataaactgaacatgaaatcattaaagattaagtcttctgttattcatatgggtgtcacacgcatagcaaaagtagcacatttaattcccagaatcactggttcatcgtaaagatgagtcatgttgaactaaagggaccatattttaatgaaccagtctggatactgaagctcaactctgcttagcagcagacagcctggggaacaggagacaatctatttttcaaatgaaaaattagtccccaatgctgtccttctgtcttaatttccttcttagcactctgtgcattcttccttcttatactccctcttgccttggggtttccttaaaaacaaaccatagacacagaacattttccattcttctgggtgggattccccgtgtggcatttgttaaccaatgagcaccagcaaatatttgtccgtatacctacagtttacccagaagctaatatggaaaatgattgcttgttcttgggggatgcttttatactctttggagaagatgaaaacatgcaggagtggacttttcatttcctaagcatggcatgccctacaggaaagaatagtccatacagggctgtagccagtagggaggacttcagaaaggagggtaaaatatgagacaaaccttaaagggtcatttttgttttgactaattcgacaaattttatcatttttcaattttctacccttttgaaatatacagggtaaaaaaatcttagaaagaagtacataatgtacccttgtatttattgctccttccaacaaatcagtttatgaaaaattttgctctgttttctatgtctaaaaagattcacgtattgaaaccttggttttgagtctttcatgggttctagatgtaataaaatattaagatataaattttagtgtcagtgaaaaatggtagagataagatgaaaaggaaatgctcattttcagtatttttatttaacaatggttaactgctatggtttgcaatattcttatgtaaatctcttaaaggagatttgaatatatgattttctgctgagcacctttaaattatgttgataaataactatgaggtctggggatgtaacttagttgctagccctagggatggccagcacgtcatgaaacccaggtgatggcacatacatctaaatggagctctcagaagagcaggaggctcagaagttcaaagtcatcctatattaggaagggtacttttaaatgtaagcttgctacaacctctaatcaccttcaaggagagtctcaattgagaaattgtctagattaagttgccctgtaggcatgcctgtggaagactgtcttaatgttaactaaagtagaatactacagcctactgtcgacagcactattccctatgcaggggcttctgaactacatagggaagcaagacagaagcacaggtgcattcttatctgtgttcttttctgcaaaaatactgtggccagctctttgaattcttgccttaacttctcctcaatgataaactgcaacagccagaggagcccttcctcacatacactgctttttggccaaggtaattaatcatactagcagaaataaaattagaacaagtatatattaagtttaaggcaactcttgtctgcataacagagagggaatagagagaggggctgaaggagaaaggggaagagaacgaaactgaaagaaaagagtagaaggataggtgtgagtcagtttattttaataatgtggttgaaaaattaaagataataaattcgggggtctctaattttttaatatattaaagctacaatcacagaaacatctatagaagcgttgaccttaaaatgagtactgcagttacagtttcacagtaatgtcatcaatggcagtttttgattttggatttttttctgttttggcttactggtcttttgcttatatattatgatttctggttttgtatttttatgtggtgtgtgtgtgtgtgtgtgtgtgtgtgtgtgtgtgtgtttgtgtgagtgtgtttctgtgttttttatatatttttttattcattgactgtttctttttctaaagagacaaagaaggcatggaattggtgagtggggagataaggagactctgggaagagctagaagagggaaaaccatgatcaaagtatattattttcaatagtaaagagaagtttaaaaaatctgtttcactctttctataaaagccaatatacaactatgcaaaattcctgtgtcaatttgaagtagacatttaaacaagtaagctattatatggctagatcatctgcttcactcattcatatgactcatactaggaaggcatgcacaccttcataagacacacactaggaaggcatgcacaccttcataggacacacagttggatgcacacacacacacacacacactcatagtatcttggaggtctgctcagtggagcagtatcttgcctctaagaaatagtcttcagtatagtgagaattctcactaagaattctcagttaagaatttagaaaggtcaagtgaggcagatgaagtagcacgaatagccaggttgatataggagagtagagcctttccagggagcaacagagagttcagcttagctaaaatgtaaatgcaagaataaaaaggtaagaatgacactaaaaatcagtcacttttaagccatatgatgaataagtattctcataaattctttttattatcaaaggttttatagatttggtgtttgtttgggattttggttttggttttttggcatggtcaataatcaaatgttactcatttctctgggggtacttttattaaaacctgggtgatggaagcaggagcaacatgtggtttaaaaaaagcttaggtgcatagaataaatgtcaagaggaccatttattcttttttcttttcttttttattggatattttatttatttacatttcgatgttatcccctttcctggtttccccttcacaaacccccatccctttccccctccccttgcttctttccttcttgtgaattatatcttcttttcatacacaatagttaatgtagcacgtagcttctactaccctgctttaagctcctggcagatcattctgccagcccccctcctgtgattcccttggatctgtgatgaaagacacacacacacacacacacacacacacacacacacactaacttctttttcacatgtgtttagctcaatggctgggcacatctaagcctccctaccactaatgtgcccttaccttcactgccagctcaacacctctaaatctgccctctaacatagttgctcagttacatttagtcctagctcaacaccttgaaatctgccctcaatttagttactcggtaacctttagttctagctcaacaactttaaatctgtccttaacctagctgcccaggtactttttccttgctcagcaccctaaatctgccctcagcttagttgtgtttctaatctcctgtctgctactccaggccaagtcggagaagcggccaatggccacttcccatgagatcttacatggctggctgctctctccccctctgaagcatggaggatcctttgtttccctttttgtctctcctaatcttcgagagtaacctagaaatcccacctcttcttcccagccattggccataagcatctttattgattgatcaagaatgagttggggaacaggaccttcagggttcacatgagcatccctgatcaaagcaacagaagcactccctacaagttaagaaaatagggaatctttagaaagattttcttactccatagcccatcctaccctctaaccaagagcttcctgcctcagcctctgcactgctaggattgtgcgcatgcatcaccacacacaatctttgaatatgatttttaaatttagtttcagtttattaacttgtgtagtgtatgcaacaatctaaataatagccattttttgtccctactttacacctggagcacttgagaaagaagaaaaatatatttgtcctgtatttgcagtttgcttggaaacagaaatacagatttgcacatgattatattaatgtgaacatgaattccttgtagtctaacgtgcttttacaggacattatgcatactatatttgtgattgaatactcactattcttaagtaatttaaaaatttaattaaaccatcccaaatggtggctcaggaaaattattgactcccttacattttagtagccgttctaaatattctggaatcgacaagaaaatagtttttaagcatcttgtctataggttcatatacaagctacatttcagtctatcctcagattaggttaaaggacaagtagggacatttaaaaatctctgtatgagacaaaatattcaagtgttactcagacatattttgtcataaatgttcgcatttcctggccttaattccttctcttagaagtgaacagtttggactaacgatcccagaggactctctgcatgtctcatgttctcttagaaatagagaacatttagttctaaatatacacatgctatatgctggctttgaggtgagagaacagtctaagtgtgattatcttataactgccaacttcaaaatggaatttgagaactgcagtgtttgtgtttatttttaagaactctcatggcctgaatattcctagaatctttaggatttgtaactggtgtaatagacccagtttataaacagaagcctgttatttaaaaacaagttaccagggtgtttaatttttatataactagaaataaaatggttaagactacctattgacaacataatgagggactttgttatgggaggacgcaggaggctgcatggatcaaaggttcagactgtttcacagtatagagctcttcacaggtgaattctgtctgaaatcttaattttcatatctgaagttgtatatggtatacctagaccaatctctgccaacaaatgcctttagcattataataacattttcaaacattcatctttagttattgtgtgtttctgattcatgcatacatgtgtgagcacatatcatgccacagggaacgtgtagagttcagaggataatactaagggttttgcatctcctcttttacaaaatgggttctgcgcagtgcttacatcttcagatatggtggtaaaagcctttgcctgccaagctgtcatgatgaccagagatactttttcaactaaataatttgcataattagttaatgaaataaataagtttgaagacaaatgctgagtgctcacgggattttgttatttgttttcaatgctccgcctataatgttcctgaagtacatagtttagattaggggcctaatagatacagcctgaaggaacaggtcaagagttagggaaattgaagtttctattattttcattttgttcccaaaacattgccctgtgtttaatttttcccaagtccaagagcatttggcaatatgttatcagccatgtagcatgaacagaaaaataacatcttactcctattccaacttttatttgttatgttaaacagaaatatctcaacattttagacaatttcttatagatacaaatgtcaaaccacattatttttagaagagaaatatcagccctctatttatttggacatctcatgggacttggcacttccctttgtttagtagcagctgtattgatccagctgctgcagttgctacttgggcagctgctgggtaccattgccaagtgcctcagatggttttaaactgatttcagaatgaaatccatggattccataaatacttacaagcgtcccttcaacgttgtccagttgcagggtgtgacctagaactatggattccaaattcagcaatcctttccttccagccataaatcaatgtgcatctcaaatagcttaaactgggaaaatacctcctgctcaggcttggatttattagcagggtttggaaacatagttgtgtaagccaagtgtttccaagggtttctgcagtctttatcttactttacttaacctgtactttctctttactctttcttctcacagacactctttgcaaatccatgttgatttctcagagtgacaggatactacctccattgatgaaatttaatcatccctcttttaagtgctaaatggcaacagcatgaacatacgtgtcagcctccatcttcatgttgattcaaacataatacttcatttaaattttttttagatacacagtcttgaaaatatgaagacacattctataacataatgccaaaccctaataatagttgttgccttgagattgtattgactaaagaaaataagcaagtttttgtatggttattttttagaaagaattattatgcttagtttaaaatggccaggaagggtttagaaattctgaataaaaatcttccatttatgttttctagagggaaaaaaatggaaaaggcatttaggactattctgaccatggaatattacgtagacatactagagtagaggaagatgccttgcaaatatcaggcaaaagcttttagactcactgtgtacacagtggctacagtgttcctggtctgttgaggggtcatatgtgcttcagtgccactgtggaggtggaatagaagaaatcaatcacccgtcacaccagggactgcctagaaagcctgcagataaaaagaaaagagcaagccgagaggagagcatactgctgataacaggatgggcgctcttaaagtttagatgggttttatcggaaaagaaatgctactttatttattgctcccaaataaatgaaataaatggcagagctcataaagggtggcacaaagtcttgtttgtggtcctcataggagatgcaagcatcagaatagtttccaaatagaaattatctatcagtcttcatctatggaatttgaagatagtttccaaatagaaattatctatcagtcttcatctatggaatttgaaggttgtatattagtcatatccaagtgagaaacttacatgagcttgcctactacagcttgggtctgtcagtggcgtcattaagcccctcccccataccctattcaaaatcacagtgatctcaaggttgcaaaaggtctggagccaacacttcattagaaacaactgtaaataatgctatatattgtttgtatcacatctgcaatttgccattatgtggtaaagaaagccggtgccttacttctagatactgatgcaaaacactgccagctcaggtccttttcaattcgactttaattcttccacacatgggattttactagaccccaggtgaggacagttaaaattccccattttcaaaagcaaccacatggctaacccaaactggctcaacagattttattgctgttttaatttccttgcccctcatggatacaagcactgccttgcatttaccttcctcaactatgaagaggataatctggttttgatgaaatcctatcttgaatataaatactgttttatgtttgtttcctggttgaatctctgccagcagttttggggcatgctgagtaggtatcagctatctcatgcatatttgaggagactcagcactttcacccctattccagagtatgtactgcagcagtagaatgtatgttggcatctgtggcagatcagcatctttcaaacataacacaaactgcagacggcctgtggtgtgcatttttcataacacaggtgttaatttctcccccaggatatataagaatggtaaatcaacagatattaactctcatgagttatgttcaagtgctcatcttaaatagtctatttagaatgccacatggttggcaaaatatttgacagtctgctcaataaattttggtctgtcatggacggtttagaatcaaccctggcacctgagcattggcccacattggtaactgcatgagtaggatgcatcagtaaatatacgtacatcagtagactgactgggaagaaagaaaacagatgctgggataaatgcaccggaacagtacaaaaatcaagtgtggacattgtttattttgtttgtttgtttgtttgtttaagtaatgccattagtcaggtatatagtggttcataaaagtatatttaaattatttacaagagctagcatttaaaaatacataaaactaagcctaagcctggtacctcgagtctgtaattctagctattgcgaggctgaattaggtaggaaatttacaagtctaaaacctggtagggctaaagaacatactatatacatatacatatacatatacatatacatatacatatacatatacatatacatatacatatacatgtgtgtgtttgacatatacaaacatatataattataaacatattcaatatacttacattatatttatataaccttattcatatatacaaagtgcagtcacactatcacaatggacagtgcctccctaaacaacatagtgtattaaatcaaaagcccatgacagatatgggttctgagttgctggtcagtggtttttcataaacacttccaatatcatttcaattgcagttgttcctggttgctctctagaacttgataataagatgctgtttaaaatactccatatgacaagacatggaaaaaccatgctggtaccaatctaaaagcttcgtctttactctctggctttcatagaactaaaaagatctatgcatactactagggtagaaaaataacgaatagtcttaccaaaatgtgaaccctgagagctaatataatgactgatttagcaagatgagttaattcttgcatttagcagtatgaatattttggaactagccaaacattttttggggagggttggattaaaaccccttccacagaacccatgattatatcataaaatgggtaatgaatcatgaccagctaggtcataagtcttagaggagagattaatactattattctgttaaatggacatattaataaactatcctccaagttcttattttacacccatacattaatgtatctccccaccttcatccaaaaagtgctttttatagtaggtgggattaataatgtggaatgatcagtttaaatgagacatctattaaaacaagcaagcagccaaacaaaataccaccaaaaccaaaaaaataaaataaaataaattttaaaaattaaaaaaaaaaagccaacacacctcaaggcttagggataattatggaaggggattgtaaaattgcaagagctactggtagtgtactggctagttttgtgtcaacttgacacagctggagttatcacagagaaaggagcttcagttgaagaaatgcctccatgagatacaactgtaaggcattttctcaattagtgatcaaaggggaaaggccccttgtgggtgggaccatctctgggctggtagtcttggttctataagagagcaggctgagcaagccaggggaggcaagccagtgaagaacatccctccatggcctctgcatcagctcctgcttcctgacctgtttgagttccagtcctgacatcctttggtgatcaacagcaatgtggaaagtgtgagctgaataaaccctttcctccccaacttacttcttggtcatgatgtttgtccaagaatagaaaccctgactaagacaggtagtaaatatgtgaacagaaaaattatttgtcaaacatgacagagctgccaaacacataaactccagtggttctggttgtgactgcaatgacacgccctgtataatatcaaaccaactaggactgtaccatgaaggcaggaggtgggcacaaagtccttccctagtggaggaacaattggcaatttctggattctggggcagagggataagataagttttcgtggggtatggtccctgaaagggaattcactctcttgtagatactgcatatgctcactactacagagaagcaatactgagcaggctcaatcctcaattggcttttatcaatattattattattattacctttatgtttatagtctaatagttaccccccccctcccagtcagccctcccacagttccttatcacattcctcctcccccttgtctccaagaggatatccccaacctacccttaacctcctgtcaggcctctctctggggcctcaagtctctcctgggctaggcacctcttatcccactgaggccagaccaagcagtcctctgctgtatatgtgttgggggccttggaccagctcctgtatgttgccaagatggtggctcagtgtctgagagatctcaagggtctaggttaattgagactgcaggtcttcctgtgggatctccttcctcctcagcttcttccagcctttccctaattcaaccacaggggtccccaacttcagttcaatggttgggtgtaagtatctgcttctgtctcagtcaccttcttgttggccctctctgagggcagccatgctaggttcctgtctgcaagcacatcatagcatcagtaatagtgttaggccttggagcatctccttgagatgaatgctaaggtgagcagatcactggactgactttgcctcagtctcttctccatttttgtccctgcagttcttttagacaggaccaattctgagtcagagtttttaactgtgggatgacaaccccatttctctacttgatggcttgtctttctactggagtattcaagttccctctccccactgttagcatttcatctaaggcccctccctttgagtcttgagattctcacattctggtattttttagagggttccccttcctcccacccactgaggttgcatattccaattcattctgctggccctcagggattccttcctgcccctccccccaaaatctgattatgttcctcttttcccttccccctctagtctcccacccaggtccctccctctgtctgctcccagtgattgctttcttctccctcccaagtgagattgaggcatcctcacttgagcctttctgtttattaatcttcttgagttctgtggattataacctatttattctgtacttttttgaccaatataaaattattagtgagtaaatatcatgcatgtgtgagttccccattcaagatgatattttcttgtcccatccatttgcctgcaaaactgagaatgtcctcattcttaatagctgagtagtattccattgtgtaaaagaaccatattttccaaatccagtcttctgttgtaggatatctggcttgtttcaagcagctgtccatcacaaataagggcactatgaacatagtggagcatgtgcccctgtgagatagtggagcatcttttgggtatatgctcaaattttctgaggagcctccagattgatttccaaagtggttgtagcagtttgcaatcccaccagccatgtaggagtgttcctcattctccacatcctcaccaacatgtgctgtcacctgaacttttgattgagtaattctgattgttgtaaggtggagtctcaaggtcgttttgattttcatttccccgatcactaaggactttgaacatttctttaggtgcttctcagacattcaagatttctcagttgtgatttctctgtttagctgtgtaccccattttttgattgggttgtttggttttttggaggttagcttcttgagttcatatattttgggcatatcagatgtggatttttaaaatgcagaggacacatgaacttgaagggaaaagttgagttgatgcagatagaggaagaattgagtggggaggaatggtaatgaacacattttagcaaagcacattatataaatgtatgatgtctcaatcaccagaaaaaatatacaaccaaagagattttattactgtcatctttcatgaaaatagctctttttagattataagagctactgcattttacttaagctggaattacattcgaatgcataatatgtattttatatgttcatgaaaattctgcttcagttactctcatagaattttaactaaagttcatgaaaatttcttcattttaaaaagaaatataaaatttggatataaagatgttgattaaattacaagtaacattaaagttcaagttagttaaatcaaaaagactggtcacaaaattgaattgtatagagtgcttgcattcatgcatgaggcccttagtaccataaagaagtacatgaagacatcatttcttttaaactacattttttactatttatgaaatatatttctttaagcagaggtagtatgtctctttggcatttaaactaattattgaactttagtattatttctaagaatagtagtttaaatatttaactataagttgtgtagttttgatgaaaaattttaaacttaacagttgttagttttagacacgagacaagaagttggctattgtcttcatgcacaaatctcaatactaggattctaacgggcaatgacattactgtttgtctttatgacactgaaataatgtttgattatatttaagttttgccatttttgtttatgacagtataaaacaattttcagtgcttcttatccttttaatctaatggcccagaagttattacaactgttcttatgagtacgtattaagcaaataacaattgctagttgacataaaccagataccattaatggatcaagtggctcacctgattaaataatttccaattgctcagtctgtaatctttgctaaaacggatggctatctatataatgtaggggagtataatataaaacaggtggccttcaaccatgtgagggcatcgtgctaatgaagttcatagatactgtggctttataacagtagataagccaatcaattggtaatgtaattctcctcccttctggccactcatgacttttgtagcaacatccaatttcttctgtaagatactgttgttttaactactatcatggtttttctcttgcttaactaccttccatgaggttaaaaatgatggtaaattgcaaattgcaattaaatacaatatcaataagatagtatactagctataaaataacctacagcataatatttgatttagtgctgactttagccagttaaagaaaatgatgctcctataattttttcagagaacctgtgagtagtcatcctgtctgttggtgagatttagtatttacaatgtcaaaatgagctctttgccatgactttctgtcatgcttatcccgcactgagttaaacaatacagattagtgagtattgtgtaataaaaatgggcagatccctggtgtgcttcatttctgattatgtacaagtgctctattctttggtgggtaactcatccttctccagattgctccttcttccttgtgattatgggaccttaatatcttcctcctaacccatttttaattctttaagaatatggttcacaaaggctctgaacaattaccttcattccgtggggagcacctaccattttattccattcagactccctttggctgaatgttagagaatgtctgggctaacctttgtaaagcgtacatttcttatgccctccatggaaataagacatctaccttccttctaataatgcagcttctcgggacattacccaaggatggcagatctaaatgtaggcaaagtgtgtggaaaaaaattatttctttggtgtggagtagaggaagccttgagggaacgagtaaagagtgcttaagtcttaggacttaatgtcagagtcccaggcctgagaataacaaatccaccttagcatgagcctgccagagttcttttaacatcacatttgttccttgacgtgaatctggatatactaaaatttacacgtcaataatatattttttatttttctaaataaattcacatttagtagttataaggatcatgaaaatataacaaattaatgtttctctttggatgttaccggacactggaatcacagaaaagtttagcaaagtgatgctgatattaaaaccatgtactgcatcatctttagaagagaccaactcaaaggaaataatactatgtaacccatctaatactcatctccttaaaaagaacgaaaatgcgaacctgacatgctggagtgagccttttctacaagcgtatggactaatgaggacctggaactcaagacaaagagaagctgccaagggaatcacagagacaagattcttgccaccaccatctgcttactgtctggggattttcataggagccaatgtaaaaataaacagtgaggcactgtttagacagtggactgtgttgaagggaacaataccagttccttaagtctgagacactttggggaataaagtcaaaccagaaggaaacttagtgggttgcagagaactgtccatgtatcataaaggcaagatattgctattctgtgtcctgctgtggaataattaattgtgcactatgggagacaccacacacacactcgggtctctgcttcataggtttgttgcttaaactttgtaaatagtcttggacaggacagtgttggaaggagtagttgaatgtgttgtccaagatgcacaataaaaacttaagacaaatgaactgtgatgatttcaacattgatccctattttctaggacatgtctggcacttgctacaccagagtttctattaattttctggtcaatgtaagcttgtagtttataattaataatgtctatgtctcactatcctgtctgtattttttaaaaaatataataggttaactgattttacatttggaagagatttacacaactaaatttttaatagtatatttttatttatgcaagataaacaaaacaagtggggcttactaacatcagcacaaaaggtgaatggcaacaaaatattggcatcagagacttacaaggaattgttctgtgatgagtcttttggattagggagtacagcagagaccacatagggaacaaaagctgaacgcagttagtgatgggctaggtggcattttgccttcattgcatcacttgttcaatagatgaatcaacttatagtcatgtgaaagtacatagttgtgagtgcagaatggaattgttattacatgcatctgtggtgggaagctgatgttctgacatactccagtctagtgcatttactgttgcgcaggagtatgtgcatcctttactgccttcacccttagcttcaaggcagaggagagtttactggtgtagtagagatggaattcataaatgaaacccaggctcttcatgcagtgcttgcttctacttcttccctgtcttaatctcatacattcagaactctgttgcctaagaaatagcaacactaatagcccattcacaaaagagctccacggccctgattctcatacagaagtttgaaggtaagcacaggcacaagctgagcttccctcaatgcttcccccaccccactcactctgctagcctctccttgtacacacacccactcacacgtatttttggaggcagaggagtactgcttgcttctgtgcaaattaagttgcagaagaaaataaatgttgacgtgaaactgaaatacactcaccaggctgggaagagcttctggagaaagcgtcctctggatgccattctggggttcccagctcccttcaactcagcaaactctagaagacaatgagccggatttgaaagcaaaattagaggcttagaagccatgggcatcaaaagattgtttgcttgtggtgcagggagatggagaaaaataagcaggtctctagttcattattgccagtctttttggttttatatatatatggagatgttttggatcttagggacctcctagacacagaagataatctaaaaatacacttgtttcaatttttaaaaagccacacatgtttaaaaatcttcctgggaggtaatctgttagatgaggctgtgataatttggcttccagcagtaacaacgtatgccaaaaatgaatcatgaagtctagacaaacgccactgttttcttccagaggcggccagcagatgctttgtgtttcttgcactctctaactggctagattaattttgtaccatgcttttactctgcaatggccttggaaccaaaatatatatataattttaaatgtgtctttcggccatttagattccctcagatcacttgctgtaacgttcttcaatattaacaaagagtaaactgccttgtgaaaagcctatctgatcatccacgatgtaccacacagctctgcttaggcagggagatcacaggcagtgtaataaggaccccagagatgttctgcaattgtcacaattccttaatgcatgaggtataagaaggacaaggcaaaggaaatgcaagcctgggggaacagagatctcaagtttgtccatgggctgtcaatcaagtacataattacaattctggtaacctcattttccacttccatgatattcataatgtaagaaaactgtgaaaccgtgaaacctttcagatcaagaacactcttcaaaatacttgttatatttggacaaattcctttgcaaattttccaaatgaaatagtcacagaatcctacaaatcaggacctttttcttttcgagggaaccaatgcacagaaggtcagtagagcctgtccttggaagatagcttaaattgacagtctgcacaatccaaatgcaagtgttagctgcaataattgtgggaaacatgattgagctttctactcattacaagcaattctcctaagcttcatagacagactttccttaattgaggaacaggcattaccaatgaatttttatgagttcattcattctagaacatttcatcatagtgcagtcagattattatattaaaaatgtatatcacaactgaagcagttttgtaaaacatgagctaatacactattgtaactatttatttttaccttagagatgtagacaagaaagcaaactgcttacagcttgaaaaatcataaccaccaatagctaatgattgagatgttgcaactcagagacagacctctctttgaccacacgaaagtaattactattggttatgaagaaatgaaaaggtcacttaaggttcaactaagacgtagcatacatggataacaatttagctgttgactgataataaaagctaagtttaagtccaccagagcaggtgcctgccctctgtgacttagcccttgcttgaactatgagatattagtctctgctagcattcctatttgctgttttaaaaataaaatagataccaaaaatactacaaaatgaaatcacccaagatattttaatgataggagatgagctccagaggcaggagtctgaagtagggtcacatcatagtctccttataatctcataaattttagtgatgattttaatatattacttaagataaacacaaaacccacttatgatgtcttaaaattaccattgaaatattcatgttttctcgtagttatagcctatcttattgtagccatagctttctctttgagtttaccatgtgtaaacattcccaatgcagcctcccaaggagccaacattgcttagatctcaagaacctataaacaagagaagtataatcatggccatcaccatgattgactacggatatgactacgggtccctgatgcagagttcagctaggtgttttaagtatagtttgttgaaggacttttgttctctttataaatttaaaagtattgttagataatatgcaatttaaaaataatttacacacacatacacatacgtgcatgcacacacacacacacacacacacacaaatgcaggctattgctaggagcctctgtaaagtttacgaattcagaaacaaggcatccaccactcccccctcccccagtgaatcagaatttcagcattctacagtgactaatgtaatgagtgaggagacacttcacagaagagtttgagagttgggctttagagaaaatgctgtcattagactccaaataccaacataactatcatttggatcaagagaatcaatgaggaatattaattaaaatattttaagtcagtaagtggttctattcctcttagtctcctccccctccacacccacgcaatgcaacatacacagtacacatacacattcacacacaaacgcacacacataatgtacacacatatatgcacacacacatgcgcgcgcgcacacacacacacacacacacaatcagaagacctccttaagaacaaacctagagttcccattggttattttctaccatattcttactggggaacaggctctttttctcctacctaaaaagcttaaattttctcatggttttcattgtcgtggcatctgaaatgatgatggagtgtcagttactcactcttgtgcgctatttacattttgtgaagactgtcaattcttcttcgtctatatcttttgaggtaatagtaaatacagatgtgtacatgattaattctccacttgctcacatttggatataggctatgttgctaactgaatcttataagcagtttgtagaggagacagaaagatgacagaggagagagaaagaagagcagtaattagagacaaaatgcagagagagtggaaatagaagagacagagatagtcagaggagcatatccagcatcttttttatacatggttattatttttattaatttttctcatgtattacatctgaaccacagttccccctccctcccttcagcctctactcccctcccatttctttcccccaaatctacttttcctcttattataaggtaggtatcccagggatatcaaccagtaagacttagcacctttcatattaaggtagggtgaggcaatccagtgggagaataaagattctcaaagctgttaagggcatcagaaacaggcctctgttcactcttattttaagagtctcacaagaacaaggagctacaaaactatagcatatatagaaagggcctaggttagacccatgtgggttcccttattgttagttccatgtcagtgagccctatatatgtccaggtttgttgattctgtgagttttcttgtggtgtccttgacccgactagctcctacatcttatacattgctgtaagagtacagaaaattgatccagattaaaggagtaaaaataaaataaggtaaataaataaataaataaataaatcattgcactcagctcaggaatgatgtgatctcaactctgaaatggtcaaatggagaaatggtgggaaagaagaaagagtgaggtgggatagagaaaagagaggaataacagaatgggaagagaaaagaagagagagacggagattaaggcatgtccaccattttttacactgttgtgaatggctttcaagtaaaaggtaaggtatgcaggattgttcacaagtagaattttttctcagccatcagccatggagagagagaaaagagaaagggggagaggaaaaagagaggaaagatagttcttccttccttgttcttcatcagggcatgaatttctagaaataccagagtagcaaggtataaataattcttatattgtccactattctgatttctatggataaacacttaattaccttaataagtcctaaagacatagatgacaactgagatgcaaagaagtaaaccaaggtttcacctggtgattgaatatgagaaatggtttctggaatctgtgaccttacacatattctgttctcctcaggcagaaatttacgtgtttgctcagttttacagaagaaatatccgtgaatgttttggagaatgagtgctttctcatttttattatatggtagacatagcgtattttaaaatgtatcatctcacacacatgcatacacacatacatacacatgtacaaacatacatatacacacacagatacacactcatacatacacaccatatacatacacacatatacacatacaagcgcacacacacacacacaaatacactagtttaatatttttgtggtttatctaccacataaagaacagaacaaaagttaaacaatttagtaaaactactgttggaaaagtaggaatcaaataagagtcatgcatggcttttatttcttcttactattattaggagaaaaaaactagagtaaacaaagaatgaagtaggaataggagacaaaaagccatttttttaatatttaaaactgtttacagaatcagagtaccctgcttatctaatgttgaaagcaccacctttaaaatatttgaaaatttgatttttcatacaactatttcctataattgatttccatacattttaaatggagcaaagaaaggtaaataaattaccaagggatatttaatgagtaacgtgtgaaatggagaggtctgtgggggcgatgacaatttggatgacacggtggtgagccataatgaaagctctcctctgatggacttacatagaactttttatgtagcagaaattatatttttaataatgcccctagatttatgattttgtaagtgtgatcatagcaactgagattttaaaataacctaataatagttacactattttttaaatcacgattgattgtgtaaactcatagctaataaatacctttaaaataactgggagcagaaggttacagagtataaaatcaagcaaaataaatagctgtgtgtataatatttattctaaattaaaaatagcggcaaatgagatagtaagaagagactataggtcttatatctttcagcaaaagtgcttgataaatgcagagaatgctacagcaaggtgtttcctcaactcagaaattaacaaaaaatgtgcggttgccatggggatatttaagttacagaaaaaaataaatcaggaaatgatgaatgtaattaatttttcttgaagttcaactgatgcaaggtaaaagcgtatttattatgtgagtgtctagtgatccatgatattaaaaaaaggagcaccaaatttgcaatatatgtaaattaggcaaattttgttattgatgttgacaacaaatacaaaagtgagttactcactggtgaatttaatttgctcaaatgattctcacaaataaataaataaatgcacatacattggcaaaaatagaagtctgacttttgtagcttttactttcaatggacaaagattgtatcaggggctacaatggcccgccacactcagaagtgagctagcatgtaaacttcctgtagttctcagcaccagttcataagattggggtggtctgagcagctttcaatgtctagctttgctacggattctaaatcagagaattaaaagctcacaattttatttggggaatcaatccagcagataagtaagaagacatatttcaagtcccgaatgcgtttgtatacacaagaacttctgacctttcacaagaagctttacatctaaactttatagaaatcccctaagttttaaatgttgagacttaatgcaaaacatgtaagtcaagtagtagaagacagataatatgggtttgcagtttctatgtgtctttgcataacttctccctaataaacacaccgtggcatgatcccttggagattttttggggtggaaattgttggttactacattgcctgtgtcatacgtttgtaagcatgaagcggttcactgtgttgtatcagtggtgacttttactaaatgataaaccattcagcctacaggtctgcccttcatgagctggtaaatctcagaatcaatctttgtgtttttaccatggattcaaaaaaataattgattttgattcactgtacaagcttatgtagtttccagtaagaggcacaactttatccacagtaacagaatcatcagacaaatttttaatgagaataacagaaatttgtatatctgtacattttatgctataaattcatgtgtacacatccatttgtatgatcagaataggaaaagatttgtgatatcgtcatggtatgttatatagctgatcttcaacaggcagtccatttgaactcagagagtgaattcatgaaatggtcactttttgttgtatcaatttttttatgctataacagagtacctgagaaaagactactaaaaagtgatgtttttattttcttgtgggccatgaatttcagtccattattgttggtggaggatgtcagagcagagaagcttttattaggcattcaagaaagacagagagagattgcctgtgtcagctgctttaccacctcccccaacttttatccgaatgttgtgggttccgagcaaatatatattgtatagcaatatcaatcacagacacatacacagagagagagaaagtgagagagacagagacagagacagaaagagacagacacacagaaacacagacacacagagaaagaatgaagtagagagaatgttgatttgtcaaaacatatgggatcttcttacctcataacatcatgttttttcttaatgaaacattttagtaagttagtttttgttgtactaaagtgctttctacatctaccctagctttacctctatagaactgctttataaatatcaagaaatgttcccactcatggcatccctttatatattaccagccattgcctaccatttccttctcatgaccaaacacacttgcccctcatcattatactcggctttgtttcttgttttgttgtcttatttgtttgccatttttagttagaacattttgaccacttgccaataaatgtaactcattttgtcagtttctgtcggtcaatgaggaataaagagctgaggcatatcttctgtaggctcttagcagcccagaaaaggtgggaagactatctcctttgttgcagttgccacattcttgtgatcagccttccacacaagcagccaaatcatgtgtttggctcacagtgaggttcaacatgaaaatattagtgattgccttctatctgcctggactgagatagtacatccacacattgttaacctcaggaaagtttgtggttgattaatagttcaaagacttcatctcaaatatactgtcaagaaaatatcttctactcttaattggtatcttgacacaaacagacacttttacttactccagttaaattgcaatacgttgacattgtatcacccttaccctagttaaatgtctctatgttagttctgcctcatcatgtttgtaccaggatcattttaaactctgtgttttgtgtcttagatcgtcctcagtttttccagctgtgcatcaaagacatagttgataaggataccatttagttttcagctaagacattactaaaagtttgataagttgggtggaatacaaaccaaagttggaagctatctcctaggacccttttctactggttcagaaacagaacccattcctcagcagcaacagccatgtgagtactccgtcattaacctccctcacagctacggggatagcatgaggtttcttcaagtgtcttatttagaaaacggtgagctacatgatgtttgcaaggtagcttggcatcctttaaaatcaaagcacttcggtatttttatttatgtactgagatgcttagttagcatgttcatctattacaatagactttaaccttgtgacaagacttcaggaactcttgcagggtttaataactgatgcatccatgtcgggttccatattttgattggtatccattttcaattgtactgttggcttttccctaatcttatgaaatggtttctactcacttcatttcctagtgattcatttaattcaccttaaacttgtaagtcatctgtgtcttgattagaatatttatttacagattctaagagtctataatccttgcctttatttctattacctcttgatcatgatatctctcataatatggtgatagttctcccagtggagagacataggcacaagctattatcttatacattgaattgtataccgcttttcataagcagtgattagatacatcattttgaagatcctttttactttgtatttactagtcttatctttcatatatatatacatattaaaactttttaatatgtatatacatattaaaaattctctctaaattaaaatttagtccttagtgaagataaaaactatatttccattctcaaaccttttctttaagactgttgctactcttctgtatatacccttgactgtatgttttttccttcatattttgtagattgttcaataaaatcagagcccatcagaaggagagccctaagaaccaaaccggtttccttgtatatggattctttgttggcttcatcagtattatttctaattatattatcagattttccatttttacacccaacctcctttttattttattgttcatgatatcttgggaatagtgatagctgtcttttaagttgtttttgtaatgaagtgtctatataacgttctaaaatccaatgtatacttttgtagcctttccatggctcctaaatggcaggtttttttttttccctctagacgtttctattgttttacctacatgtataagtttctctttgttagtaaagattacctcagaagcagaaacctatgtcattgttctgtgttcatcctgagaaatttgtttcaagagaacacaaaaatctcagatgttctcccttagggataagaaagcccaagtggctagaatttcccatcattgcctttttctcgtgggagttttataatgtactgttagcattacacatgcacttattacaagtgtgaactcaaaacttcaaaccagggttatgtgatcaaaactcttagccatctgtatttgcagacatctttgaggcagttctgccctctccagtgtaagatctgctattaggaagcatcatctatccctgcaggttgagatgtagcacagcgcatcatcctgatcctgcagccacttacactcattcaggtagtttctactaagggtaactctgtgcacatgctcattgcataggggaaaaataccttttcaattgttttaggcattttctagagtcttccatatagcatagttattttgtaacatgtatcgtgttaaatgtaagacaatttctaatgttaaattgtaaactttgcttaggatttagaaataggttgggcaccaggttcagtgaacagccatgcacatgtctgaggccttttgtggccaacacattcaagatgatttcctactgagaactgcataaaagtctctacttttgttcttatagattatccctaccttgaacccattcgtcaactaggctgcttttactcacatcaagatttctgtaaatctgcctaatacagccctaaggatgtcatttcctggttggaacatcttctttgttaaatcttccgtgaagttgagaacctctataatagcccttcaaacatttttgttggacttctatttcataacccacagcttcttatcacattccccaaatccacagggtgagctggggcttcgctttttgtactcaggcctctatccatgccctttgtccctctaagctctctgtttaccactacttggacattaaaagtctctcagctcacattcctgaacccccaggagatttgtttcttgtgtaagtttgctgagtgtcatcccctctgccccagctaagtatcaatagcaaacattgaaattcaagagtctggctgtgagctagtttgtacagtctatgaaagtgaaccagatcctcaagaaaggatctcacacctgcatcttccttaacaatacttgttgaactgcagcctgtgttattctgtaatctgtacgtaaattcctctaaggctttctcagatggcatcactcattgtaatgtgcctaggaaaaggcttcacttagaaatacttactgatttagtacaaaaaggagttatcttattaagaacaatactcttgaggagtccaaagttagtagttcattctagaattattttttctaaataataagtagaaaatggtaatctatgaaatgttatgaagatttacatatgtgagtggtgggaggggaaggaagggaagaagagggaaataaaaagcaggaaaaataaaggcaccaccaagaataatgaactacagaggctttggtcatttccatctccaggctctcctccttctgtcaagaattcctgcccacatttgaagggaaattacacatgcacgtataatcccctagtaatgtaggagatattgtcttattccatacttagagaaaggtgagtgccagcttaaatttaaaatatacaaaataaaggccattatgcatttggacatcacaatgcagagttgagaggttttatggaagataaaaggctacagatgagagagcagcctctgaaaatagggaaaaaagctcagcaattaaccttaagatgaagtagctttcctttctcaccatgatcaactcatacttaagtctttaaatggaaaatgacttgtagttaacctttatgattcagaaaaccatttaattgtaattatagctaatccaattaaagatggattataataactgctgaattaataggtcatgaaacactgagtttaattatgagtgtatttattttggaaaaattactcttaaggtattatgtaattttaaaaattattttgagctcaaaattatataggttgtgattcataagtaaaagaagaagaaggagtgaataccccagagctcttcaaggcataagggcagaacaggaaacaggacaatatgagtgacaaagcttgattttaaataactaaactcaatttttttaaattcacaaccttgaaaaaatactattagtagtttagtttcatccctagaaacatcaaaattattgttaaactttatattctaatgagattagtagaattaaaagaaaattttacttttaaaaccacaaatcgtcacatcgcacactgtaactctgaaactcagacacttgggtctttagttgcatatttagagggaaatgtaactgtgtttaaagtagaacaaatgaccagtgttaacatcaatagatatattttaacattagtgttttgttctttttctacatttaaaagttatggaaacagacatgagtagatataaaacaaaacaaaacaaaaccacaatggcttgaacaagaaaataattacccacagcaattgaagcacatattaggggatgcatacagtagggtttcagtctttccaacacttctcaccaatatgcaaaagggcgtactcttccatgatgtgcacattcaagccatgttctccaattgggttttggggtgatattagtaaattctcactgtaaatatcaatttccctaattctacactgcacagttttcattcttaatattaataaaatgtaagcaaacagacaaggttttcaaactatcatctgacggcatggggaatttcccataggtggaaagaaataacgttttcaaatgttttcttctaatacatgctttgtccttgaaccatgtacatcatgaccaaaagcatttctcttgctgcttcttgactatgttttcagctggttataaaaagtgtcaaggtttctttacatattctcttatgaattatccagtggcttatacttttaagataacattccacgcaggtgagatggttactgccaggcctgacaacccgggtttcatcccagaggctcacccagtggaagcagagagcggattcacaggttgttctttgactccagtgtgcatctagctatgcacacacacatgcacacacacggagatacacacagagaaagacagagacagacagacagacaaagagaatgagaaaaccagcaaaaccacaacaacaaaacaactagtactctccaaatgaggcgcatgaaaagttttcatagaaaaattaatacaaatctagaatattacaactggagaactttgaaggagacagcaaaatggtacacggtggaccacataaggtatccatagaaactggctcaaaaagctacaagctgtgatggagatgcctcagcctgggccaggttatggtcatgcttaccactcagacacttgatactcagcaaggtcctgagggaacttgtgcctacggatagatacactgtggtaactacccttgtgtgccacagactggagccatccactctctcctgtgtggatctccagatgcacggctgcttcgcttgaaatcaaactgcattcttcctgagcaacaacctcctctgaagccttgtcccttagcgtttggaagctgctgagctgcacataatcaagccttcctcggagttgtttaaaacaggcgcattatcagagtctcatctctctgaaagcttcagacttcattacactattagaaaaaaattaacatattgtacctgataagcctctacacagccgaaatcctcgcatccacactaatgctgactatgccagcacttctttctgattaaaagtaagttactcaaagttaaaatatgtgctctttttctacttccttcttgagattaaaaaatcaaccatgaagttgttctgacgataattttctttcagtaaactcaagcaatcattgtagcatgacattttgattctgattttgaagggatttgtgaaagaaaatcaagaggcatgcttatcatgggtaacaaggacgggaaactggaaggaatacagtgatcccgggctagtggcttagtagaacattttaaataggctgctctaatgctgttttatatcatctgttagtgcctaaataccattaaggttgagggatttgtcaaaaataaacgtatatagacatttgagcgagaatagcatttttacatttttgaaagcaggttttatctataattacgaataactatgtatgcatttgtggcagagccaatttactgatacctaattttaatcatcaaaaaatttaaactaacttaaaagactggaacttctgtgatctgaaaccaagagttgcaatggtcttccaagagtagactattagtcaccactattttacaaagcaaggtcctgcaactttatgttaagaaatgatgtgaacagcacaggactattgatttcaaaactttaaattaatacggttgcacatatcacattaaaaataaattctagacaagaagactgtaaagcagaagtagcactgggtagaaaacaacctagtaatttgaaggattgcttgtaagctcagagtcactggttggagagagatgcccataaaaaagcaatgtgcttgttgaaaatgctcatgatttattcaactgctatggttagagcttaaagggggactagatctttcaatgactgtaaagtaaaattgcacaattttattgttggttaatattttactttagacacagtcaactctgttcttaccatgccttaccacagtgttccaacaattgcccccagattgaattgtgccacgtgagcaagactaaattagaacaacttctaatacagtttgcacctagactaactgcactgatgatttctttattgtttcccaagtgtaatcattttactattttagagttagaaaagccaagcttctgatagaagatagaaaaaaagcagccctgccagatgtaaagaactcccctatgactacgacgaaaggtgcagcttagggttagatgcctcatcatgatatttgatgatcccactttaattcactgtattatcacgtgatattcagctttctacaaactctataaaattttagtttatttatcaagaatacaggtaaattttttatttgttgatagagaattggaaatagaggcagtccagatgctgtcaggagaaaagagccttagagactcctttgttagaattctggtagggggacagaccacttacttagcactagtgaactcacacatgtgtgtactacagctatccaaaagagaggcttgtaattttcatggtagctccaagttactcagcaaaacagcaatgttccaaatgccttgtatgtgatgagctgcactggaaacaatcgagggaattgcctgaggagaacagagagagcatactcagtacagttagatcatgtgttctttgttgctaataaatacaaataggtttttagggaccaaagagacagttcaatgggcaagagtacttgctgttcaaggaaaaggatgtgagttctggtccccagctctcataaaatcccatgtacctgtaaccacagtgttggcataaggagaaggtcagaggcaagagaatccctggggatgcaggctcccatcctgttcccaggttcagtgagaatgtctgtctcaagagcaaaagatggacagtgacagaacaggacacatgattgtcctctggcttccccatgcatatagaaaggaataaacatatacttgtgcatacatgtgtataaccacacatccatacctgtacatataatagtttcagaatcaaactgttgtaggttatacaaagttgaatatagttgtgatgtctccctaagactcagtttccccaacatgagtctgtcaaggtgggggggacatgaatgttgagcattaaacttcaagcagtttaataagtattagccattactccttctttctgggtataaacatgtatttctccctgtattctaaatctaatttcagtggggaacctagagtaaatctcgtatgacaagaaatgtgaagaatccaccctacacctggagctggggaacgccagatcccagttgtctcattttattatttcttgaaacataccacaaaataatctgcacaaaatatgtccatgtatttgagacaactgaataatttacaggattgtctcttttccaaactgtcatcatgtacacttggcaaatggattcacaattgagaataattttatagaaaagagatggtaaattattcacattgtcctttttccccatcagcacattaattaacacagcatattaaggacttgtttcatgtataatataatacacaatgaacgaagattaaaatgtcgtagaaaattcaaaacagatgcattcctttaacagctggatgacacatagctcaccttttatttaagcagagagtactacatttttacattatttcttgaacttctaaataactaggggagtttttaagtttcattgagaattaattgtcgttattggtatatattcaaatttttaaaattaaacatactgttcctaatatttttgtttttattctgccatatcttaatggaaatgaagttagcctcactttaagaatgttttggctggatattttattctctattctggggaggaatgaagtatccacaggttggtcttccttcttgattttcttgtgttttggaagttgtatcttgggtgttctaggtttctgggctaatatccacctatcagtgagtgcatatcaagtgacttcttttgtgattgggttacctcactcaggatgatatcctcctgatacatccatttgcccaagaatatttcattcctccctagaatacttcccaagagtactcccaagaatacttcgttcctccctagaatagggaataaaatatccatggaaggaattacagagacaaagtttggagctaagacgaaaggatggaccatccagagattgcctcacccggggatccatcccataatcatccacgaaatgcagacactattgcatatgccagcaagattttgctgaaaggaccctgatatagctgtctcctgtgaggctttgccagtgcctgacaaatacagaagtggatgctcacagtcatctataggatggaacacaggacccccaatgtaggagctaaagtacccaaggagctaaaggggtctgcaaccctataggtggaacaacaatatgaactaatcagtacccccagaactcatgtctctagctgcatatgtagcagaagatggcctagttgaccatcattgggaagagaagccccttggtctagcaaactttatatgccccagtacaggggaaatccagggccaaaaagtaggagtgagtgggtaggggaacagggtgggggaaagggtataggggacttttgagatagcatttgaaatgtaaatgaagaaaatatctaatttctaaaaaggcgaaaaaaaaaaaaaaagaatgttttggctgctgtgaggtagtggcacaaacctcagcatttgggaggaagaagcagcagagctctgagtttgaggccagcctggtctgcagagtggcagcgagggttacacagagaaaccatgtcttagaaaatgttttggtgacttttacacaaacatatttattattaaataaaaattaatcctgcaatataggtacatggaaataatcaatatatttggttataaaacaaatagatttctatcgcagtgatgtataaactaattggctggtatctacaagagttgagctacatgattttaaatcagtttgtgtagctccatatactattttaaaaatattttcttgttacacttgtttgcatagccttcctctgcaatttgtcgtttaagatttgattttttgtttaagatcatttgctcttggtcctaagcttaggaggaagatattaacatggggggggggcatagtaatttgtgttcctaatcttattctggatttgtaaacaaggatgagcccccgtttcctgaacccttcctttgggtttttattaaacaactgacaccaaagtcaacttttacagatctttctaacgacatcatttggtactaaacatgccaatgatagttgtccagttgtgttcagtattttaacttggatcaataaaatttgaaatttgtaaagtactttcagaaacaagtaatgattttcaaggtgttgtgagacgagaagtgaacaggggatgggttaggccaactcagctgctgctgattgtccctgccaggtctgccgagtcattttgtaaaagaaaaggtgttgataaaaccatataactcttgggagggggaaaagaaagaaagaacatgtcaacgaaaaggatggatgtttggagagaaatatctgtgaaaaggtctggagaaagggatattgatactgaggaagggcgagaagggggtgaacagtttatgctctaagctctgagatatggagacaccatctaatacatgcagacacacaagtcctgagtcctaaccagagaataccatttatgaggaaactagagacaaatgcatcttagatcagctttctagagagcatatggggcaacggactatgctgttgctgtgtataccccctggaagaaagaattcctgcaatgtaccaacctcaagaactcagaatctgcaacaccaagaggtctcatccaggttatataccactaaaatggctggagcctagagaacaactgcttggccaatctgcctgcaggtaggacacagagcttcatgaatgctctgtccctgagccatccctccttctaggatgggaaccccaatgatgaagttgcctttgaacctcccaatttttcttcctgtaagaaatctctataaacttgttgcttccaaaggtcaacaccaaattttaaggtttctctctgaaacaacaaacaaaaacttaaacaaaacatgaaggcaaaacaaaacaaataaaaaccatactgctttcctctgtaattttatagacataaggatgtttggaaaaggataggtggtaggcacctgtgtccccaataaatgacaagatatttggtcattatagattttcagagaatatacagccctggtacctaatggagaagacttcttttgggatgctattaaaggacatgaccataaaagagctcaattgttctacataggaactaagatctcccagaagaacatgctgggaacacagcaaggacagtttggagaataagcaagctagacttgtggccagttcaaaagactaaaagattatgtttgctttttttcttagctttatcatcaaaatgaattacgtgcctgtccttatatgtttcaactctacttgccagatgtcaccaaagaaacctattttctagacattttttcagatattctgtcatctaaaaatgtttatgcatacagtctatttttctgtggttggccacataaatttcagacctgctgatcttatccatcttgaagatcctggcagtttcacagctgtttgggggaatcgagatactgttctctggagtcttaatttgtctcagagaatgtacaagcacctggaatcatagaagaatggtagatgcatccttccagccagcctgttgtcaggtgtgctcctgggcctcattacagcatcctctacagggagaagcttggctcagttttcaggttaagcaagggtgatgctgtttatagctgtagagacacagggaagaagagaaagtcatataaatcagttcaaatgaagccataaataacaaaaggcacacatgacactccatggacctgtgcttcaaatcccttcccatttgcaggctacacatttgtattaataatgatggcattcaaacctgccaatatggaagggatggaagccaggtgaataaattcaggtgagatttatgatccagcagcatagcctcagttaggaaagaaagaaaggtgtgtctccagaggcagctgatcccgtcttggcacgtagagtgctgctgaagtcacagtttgcagctgttttagtcctgtcagtgccagttggccagctaatggaaatggtagaagaaaagaacaaaatgtcaccacagagaagagtaaattggaaattcaagcatttttattcctttataatcctgctgaatcaaaacgaaatcactctacaaatttgccatctccatattaacaaaaagcaggtaggtgtacaaaccattcagggaggaaagattgactggcattcttttgaccattagcttgttcaaatagcttcatgatttctaataacttggcgaattagtttataaatgacaatattgattttaaaagtgtaatttttagtggaaaattgcagtgcatttggacacaggccttacattaagggtccattgtagtggtgtagcggggtcaattttaaactgttattttgctaataacatatgaagcattccataaacatctttctaatactgttcacctggacttactatatgatcatttccaaatacctcacacaaagctatgaaaaccaattctctatacacataagtcatgattttaacctccaaaatgaatgagtgtgttaatgcccatgatttactaattttaagcattcatataatccagcacacttacttttatttttagctttagagaagaatcttaaatgtattaccaaaacaaacacaagaagatcaaatgagcatatgcccatcataagtttagtgtaagataacacaatatgaaaagcatatattgttggaacatcacagctgatacctctataaacacaccaaagaccatccttcccttcagagaaatagccaccttaatgcctcacagatgaactacaagtagctaaccaaaggttaaaacataatgtgagtttaaagcgcagtgatatggtggcttatccatttcttgccactgggtatatagaagaagttgagttaatattcacatggcaaagagataaccaacattattctatgacttctctaaagcacgggacccaagcttcaagcaccatcctggtcatcatctggccttatgtgcaaaattagtcttgtatcttcacttcgagattttgctataatgctgtgtttctctatgtgtaaacaatttactcatattgactaatgataaatcatagctctatcaatatattggaatgtatttgtattttcaatagaatttagcaacaaatagttatttctatatagtgtttatgtgccatttattctgtacaggttatcttctggtttctcaattgtacatgaaattatcaactgtcattttataaacaagtttgacaccccagtctatttcgtttgccattgatcactgaagaaaccatatactgtagtactatacactgtactttaaaaccctttaaaaatcgcaggactttgggaaaactatgctacacctgaagcacaagtttctatcacatttttagaattaaaaagctcacataatttattacataaatagttcagaatcctaaaataaagcttctgcattggcagagtccaaatctgtctggcatcaggtttatccaatggaaggttagcaattcctttggtttcctgttggaataagtcgtgatactaagtgtcttttctttagcagtaagaatatgaaattgtggttttgctttttcactggagaacagaggagatagcatagaattgtgtgtgtgtgtgtgtgtgtgtgtgtgtgtgtgtgtgtgtgtgtgtgtgtttgtgtgtctgattcctgaacattttcagggtaagtgacttaccagctggcatgatctgcacatttatttacagcctgtcctttaacactattttgtcaacagcatcactgaccaccatttagtgctcagtgtttgttgctgggtagatttctttcatggacgctcctttgtgctcctctcttctgtggttcatatttcttggatgtacaactttatctgcacagctccaaaactcgaatgtgttatctctcagttaaaaatgccagttgtagcccattcactatcagatgaaagcttctgccttctcaacaagatggcgtcttctgttcaactggggtcctcagaacagtaacttcattacaacatgcagttgcctcagaattttagaaaagagcctctaaagcaggcgtgctcagtcagagtttactttacaaagattgctcagcatacctgtacactacatgtaacaggagattaatatccagaatacataagaaacttaagaaaaactcaataaaaaaaatacataaaacaatcagaatttaaaaaccaacactagacattcctgtgtaagttttatatgtaacaataatcaatatgaaggaaaactgccacctctaaacaccaggggaatgcaaatcaaagccacagtgatatgtcatccctctgcagtgacggtggtgagtctggaaggactaaatgcaactgcaggcaagagtgtgacaagatgaaagcacgggtgcactgttgtgggaacaattaagtagtgtaacaactatgaaaacttcatgaaatctaacttaaaatagtaaaattactgtatgactcagaaaacccatcactgggaaatatgcagaagaaataaagtatgtgtgttggaagagatatctgaattaccatgtttattgaaacactatttacaaaggctaagaaatagtaacaggctatgtggctagcgagtgatgagtgaagaaaataagacacacatacaccacaaatactattcatcagttagaaaaaaaaatctccttatttgcaacgacttggatagtactggaaacaattattttaagtaaaaatgagccaggcatagaaagtcaaacaccacaagctctcattcacatccaggcatagaaagtcaaacaccacaagctctcattcacatccaggcatagaaagtcaaacaccacaggatctcattcacatccaggcatacaaagtcaaacaccagaggatctcattcatatcctgtggagtctaaagctttgaggtttctgtttatttctatttttcaattaaaatgaaaagtcccccaaagtttgatttaaaggaatacctagctgttgtttgtgccctaaagtgtgtgaagtcctagtggcattgcctgcctcatgtcgtttctcatgctcccatcactccaggcttctacttctctgaaagtgactatcacttccctagatacagaataatccttttttttcttttactctaaccttccatatactaagttatgtttctgaggctgaaacccctccctgctcacctttgtacaagctgggaaacctggtctgccctccttcctccaacctgcccacttggagaaaacccctggctaacattaattcctcatctccacgtttcctgttacctactcaagagcacccacccagggtctcagtttgaccctgtatggacataatcccagctcttagcagacacttcatcacttctcccctaagctctataaaagccccctgtctttagcctggacctgtgagatcagtgatcccaccagaactgccttctaaaaaacttgcctttatctgcttttaatctggtctaatctggcctatatcttcatgactaaggaagagaaaaatctatcaatttctctgtgcagaattccctttccatgacttcctaagaaaatcctgaaaacatgtaaaacaaaaaatagaatgaataacttcaaatcttatattttcaagcatgcagtcacttttctccacttccatagcatgtgtcaccggtttttcttttgaggtcagaaccatctgctaatgtgtctcttcccctcactagattgtttttgcttctctgatacagagtaaaattcaaataatatgacagcttcatcaatatctgtccaaaacctgtggaagagtgtactgcatgacagttccctgcgtcttgcccaacacaacctaactttcctacaagactgcatgagcaatggcatcagatctcatgtgccacacccaaaatgattaagtccagtccttagccacagtgagttaatatagtttggctttagatattgcctgctgatagtatttcttataaatcctacctaaaataataagataaagaggacgcataagtaaaaaataggctaaattataggaaatcacacattgtttgaataataattaagatctatctgtattcaacactctaaacactgtcaaagatagggcaaagagtgatacccacattgccgaaaattttctcagtgtggtttttgactcaaactaaggtccagcagaaattgttagaaactcgtaggcaatcctaggcaatcgtagtctttcaaacacagttgactcagtgaaggagtgcttcttttctattgaaagccattaatctagtaggactatatgcattcctcccagatgacaaataaatactcaattaaaatcatatgtacattttagagaggtatttttgatgcctatcttgatgaaaagagataacatcaaagcacagtattcaaattgtattacaaatcaagtttgattaaaaggaaagtaaactttgagtctcaattgagaaaattttatttttatactaacagatttgaattatagaaaacattactataatttatcattgtatcttgatttttgtttgtttgtttgaggggttataatgttttggaaattcgttgactaatgcacactaattttacatgataatggctctcattactccatttcatacacatatacactatattttaatcgttttcatggttcctctaagcctctcttgtttccttcctactccttttaagcacgcttccaaagctttgcatcttcttttctaaactcgcctcagctctactttcttatctgtactgtgacccagtgagtcctattcatgttgtttagagtatgggtggtatctccctcagaattattggttttgtctccattcatttacattaaaattttcttaactttaattttctttccttttggaaaaaaaaatgtttacttacattccaaatgttgccccaacatcccagtccccccctccaagagcttttcacccatccccctcccctttgcctctgagagagtgctccccacacactcccccacccacatcccctcaccccatcccctgcatcccctttccctggggtgtcaagtctctatagggttaggtacatcctctcccactggggccagataaggcctctactacctatgtgccagggtcctcagaccagcgtatgcatgctctttggttggcttagtctctcagagctcccaggggtccaggttatttgatactgttgttcttcctataggattgccatcaccttcagctcctttaatacttcccctaactcttccatagggcttctgacctcagttcaagggttagctgtaagtatctgtatctgtcttagctgctgggagagctccaatgtgcagtcacaacatggcatcagtaatagtgtcagggtttggtgcctgtgcttgggatggatcccagttgggcctgtcactggatggcctttccttcaatctctgctccatttttgtctctacatttcttttagacaggaacaattctgggtcaaagattttgaaggtaggtggatgaccccatccctccactgtgggccctgtctatctacagaaggtggtcaatacaggttctatctccctactgttgggcattttgtctaaggtcgtccccattgagtcctggggggatctcacatcccaggtctctggaacttcctagaggttcctccaacttcccacctccacagatgcatattttcattcattcttctggccctctgggcttctcttctatttccccccaatacctgatcctgcttatacctgatcctgctttcccttttcccctcccactcccttctcccacccaggtcctcccctccctctgctgcccatgactgagaaatattttcttcacatattttcattcatttgtggatgttagctttgaatcttcagatacatgtctttcatttggaatagccatagagagcaggaaattagtacagaaccttcaaggaagaagagacagaatgaagtggtataaagacttaaagagggaataatgaaacaggaaggggtaaatgtgggtgggggatgggatggcaggactagaggagagaatactaggagggataaatatactaaaaacttctttaaaatgtcatgtggaaatgtactacagtagaaaatttctaaaatttatgatacacacacagattttaaacggagttaaactgtaacaagagaagaatgatcgtactaatcgcaggctaacaaatagataggccagggctgggagtgggttacttatttacacttgttggtcactggtgtccaatagaccatcctcaatggttgtaggctattgccattgattttggttaccctccaaaatatgacattgaaatgctatttctgacgatattacacacttgattcatgaaacaggggactcaaactagtactgacatagaaacttcatcccttccagctagctttcatagggctggaaggtgctaatactattagaagagaaaaaaatcatcgtaagttgtgtccagcagtgaaccttgtgaactgcaataatgactggcctggcaaggacacacctattggtacaatagtggcatgaacatcacaggaataatcaaccaccaaccatatttgatttgatttagatttcacttcaaaagatgaagcccatccctggcactattttcgggcaaagaacatgtgtctaggcaggtcatacaccccagggagaaactacaactattattctgttaacccactcttagtggcttaattttgtgtccaagtatcaaggcgactcttaattctcactaggcaactcttcttttggcagtagatggcacttaacacagacaccggtcaagaagcagaaaataaaagattatagaatgctcagccttaaacaggacatttctatcatactccctcctcccaaggcttagggatcattgtggaagatggggaagaaatattgtaagagccataggtgataaacgactacacaaagaatgatttctacacacagcaaggtggtttcacatacgaattcacagcagttgagagagaatgcacagaaactctgtagactcagatcagacaaaaatcacagcatggagggtaaggatggacacaaagacccacttctacagaaggagcaatcgagaactaacaggtactgggtgaggcagagacagttttctttaaggatgtgaatcatggtgggtcgacacaagttcaaagcatatacggaaagaatgagctgtacatgatgggtttaaatcaaaagggggcgaaattttgtgataaggaaaaataggagaagttggcaaaagggatgaatacgatcaaaatacattgcatgaaattctaaaagaaaaaaaaaaagaattaaaaagtgagtggagaagaatgaagagtatagatggatgagaggggaaccttactagctgtattcatttttttttaaccaatgtcagactttcttttggttttatcacataagaacctaatttccctgattctgcttcctggtttatacatcctaagatactttctgttttgtaaccaagagaaaaacattacccacctctgctctactggcaaaaccagatgagacattcagaactgggccgcatatctatcgcccttgcaatacactgaagcacttaaatagttcataaagaattttgtttaaaaagcataacaaaaatctggtgtgttttataaatatgcatttgaaatattttctagaaatagtcaccagattacaagattgtggaaaactatttggaaggaaaatgaaaaacagcattaaaaattcatatctccacagctcaggactagatcaaatgtatttaaagcttctctgtgtatattatatcattgatatatatatatcaatgatatatatatatatatatatatgtatcaattacatattatatatatattatatatatatatatattatatataatacacatacacacacaaatatatacacacacatatgaaagcagcaactcaacattcaggtaaacttccttcagatagtaaatggttataattttttaaaagctgaagattgccttcaggtgttgaagagctgaatgggctttggcttcctgcaacaacttacataattaaactcagcaagtagctcttccgatgtttactgtctgtgtttctggtgtaccattgcttccgaacacatactgagggctcttcagaatagaagcaggaaggcattttatttcactgtgacttgtatatatcccttaaacacaaagcaatttttttgtgtcaaaactttgtttcccttaaaagcatttgtggtagagtagttatgtcatttctgaaatgcttgctgtaaagtggttgcctgttagaaccacagtttccagagaactagatgaaaactcagcagctgcctcaagcagtcccctgaagagccaaagagatcacatgtgcaaagctctctgctctgaaagtcctgacaccttctgttccgaagcctaatgttttgattagaatatgacgaacgagctcacacagtcactgagatatgctaaggagctgcaagaattaaaatcataaaggaattaaagcaatttttttctagttgattagtttttttccaaggtgttgttttttcttttttttttaataaaatcaggaatttaatttaaacaagttttgtgattatttttctccaaattttctatttgcatctctgactttcattaactaaattgttatcttgtcctcaaaagtatcacttatccaactttgacattatttccaatatttttagcttttatgccaaatttttgtgactatgtagtaatacatagcagttcagaggtgggtaattttaagtctacttattatttaaacagttataggtgttggtaagtttttctatgatgtgttttaatgattatatctaagtatgggtctttgtgacactagcccagacatttttaatagttctaaaatagtcagtcaccacttctgattaaagatattcttataacctttatgtgatgaaaatcatgttatagagtaacatttaaaaataatagaaggatcacaggtctccaacatctactaaaaattcatggagtagaatttagcaacatcatactgttagataaggaggaaagaaaatatttactctaagagtaataactataaatgctttattttggatggttgttgatccaccgatatttgatctctttcttaaaatgtttacaaactgttgcaccaattataattcaaaatgcatggaagtagatactataaaaaatctgattttcaagtggaattgattttttttcctgacatacatcaataacaaatgcagttttcttataccaaaaaatttctaaaagacatattttatagacatttaaatctgtctactgtcatggaagacttatgtaagttgtttaataaaacctgccgtcttcttagatagttaacaagaaaacgcaaagtcatttcctttaaggtgatatagtgtcaatctacacagtgtgctttcatgtgccattgttactaatatttagaaaatatccaactacatagtatagggaaactttttttcctctgggtttattgaggcatactttataaataaaagtatgttatatttcaaatgtacaaaattttgaaaagtccatacacatggtatgcaataaacagcacagtccagataataaacaattcaggatctcacatagttaacatttatttgtatatatgtgaagaatatgtattatctgctctcagcggatgtcttttttttttttttttttgagacaggttttctctgtgtagccctggctgtcctggaactcactctgtagaccaggctggcctcgaactcagtggatgtcttgaaaaaaattataaacccctacaacatttccatgaggacatttttctgcagcatttcaaaatagccaagatacagacacagtctgagtgactgccaacagacaaaaggataaagaaattctatgtaggggtttcttggaggttagcttcctgcgttctttatatattttggatagtagccctctatcagaagttgggctagtgaagaatttttttcataatttgtaggttgcttatttgtcctattgactatgtcctttgccatacagaagattttcaatttcatgaggtcccatttatcagtttttgatgttagagcctgagccactggagttctgtttaggaaatacccccatccctgggccagtgagttcaaggctctttccaactttctcttcagtgtatctggttgtggtccttgatccacttggatttgagctttgtgcaaggtgacaaatatggatcaattttcatttttctacatacagactgaccgttagactagcaccatttattgaagatgctttcttttttccgctgtatatttttggcttctttgtcaaaaatcaagtgtctataagtatatggttttatttcttggtcttcagttctattccactgatcaacctgtctgtctctgtaccaatgccatgcagtttttatcactgttgctctgtagtatagcttgaggtcaaggatggtgattcccccagaagttattttattgttaagaattgtttttattattctgggatctttgtttttccagataaatttgaaaatttttctttccatgtctttgaagaattttgttagaattttgatggggattgcattgaatctgtagattatttttggtaggatggctgtttttagtgttaattctaccatccatgaacatggatgttctctccattttctgtgatcctctctgatttctttcttaagagaatttaagttcttgtcatacggatattcacttgtttggagtaaatttcttgactgagaaatggctcagtgattaagagcaccgactgatcttacataggtcctgggttcaattcccagaaaccacacagtagctcacaaccatctgtaataggatccgatgccctcttctggtgtgtctgaagacaactacagtgtactcatgtaaatgtcttttcttttctttcctttccttttcttttcttttgtctttttttctcctttgatattttctttatttacatttcaaatgttatcccctttcctggtttcccctccaaaaaccccctaacccctccctactccctctgctcaccaattcatccactcccacttcctggctctggaattcccctacaatggggcatagagccttcacaggatcaagggcttctcttcccattgatgactgacaaaatcatcctctactacatatgtacctggagcctggagccctccatgtatactctttggttggtggtttatcaaaaatgtccatcttgctgaaagcaatttacagattaaatgtaatcaccatcaaaatttcaactcaagtcttcacagagttagaaagagcaatttgcaaattcatctggagtaacaaaaaacctcggataagctgggtgtggtggtgcacgcctttaatcccagcactcgggaggcaaaggcaggcagatttctgagttcgaggccagcctggtctacaaactgagttccaggaaagccagggctatacagagaaaccctgcctcgaaaaaaaacaaaacaaaacaaaacaaaaacaaaaaacaaaacaaaacaaaaaaaaactcggatagtgaaaactattctcaacagttaaaaaaaaaaaaaaaacttctggtggaatcaccatccctgaccttaagctatactacagagcaattgtgataaaaactgcatggagttggtacagtgacaggcaggtagatcagtggaatacaattgaagatccagaaatgaatccacatacctatggccatgtaaatttcttaatgaaaaataatccacataaatatctgctctacaattcatgaattcttttactttgcaaaatcattggtctgttattaatttgtgtaaattagctcttttattataagatatatatgatgataagaaagtcaagaatatattaaacagattcatctttttatacagcattgtattggcagacttctttttttctattcaaccttcccaatattaatataactgtgaacaatgataggaagaataatatggccacctaatctttccaagatttgctccagcctcatgtcattcttagtattttagcctaaacatttggaaataaacaaatatatttaataaatggtaacatcaaggtgctaccttgtaatggtccacattaaaggacatcaattatgtggatgacatattttttaaatacaacttgaaaaggttgtatgatatacaaacaacaaacagagccccttaaggtctgattcagctacattaaataataaccaaagcagatgaattaaaaatcatggatgcttatgatatgtaaaaacagcaacaaatctcactgtgccgtgtttgttccaagatagcttaaggaaaagagaatatagaatgcagtggtcaaggtcttacttctggatagtaattaattcctacactacaaagaggaaaatacagttattttaattacagataaattgtgaagcccctgcttcctctctaaccaagtgcacctgctcactttccctctgatagaggatactataatttcttaactttgccttcaattcagcccaactggttccatagaaacacctgtctaagaagtcacacacaacctgtaggccctgtgtggcatctcgttgtctccagttgggcaacttataggaacttgtccccttgagaccctgcttctggaaaatgctgtgccccatgttcttcagcttccatgtctttcctggtctaatttctttcatggttttgatagcaacatttctgtctttgacacccatacattacatgtttccagtagatacacatttctattctgatgttgcctatccatctattattatgttttgctctcagctagatcacccattgtaatggttttttgatatgtatctcaagtcatacctcgtcatcatatgtcctcaggcattagatagggcatagggcatactagccccgagatctgtctggaaactctctacttttcctcctcagcattgataatagagacttaagaggaaagcattcacatagtccaggaacaccaacaataaagcattttgttgattaaaatgtagcatctacagataagttgtatgtagttataaataaagtcagaaagaatcaatgtactttggagaaaaacagcttgaaggagtagaaaatcctcagtatgtgacaccaacaatataacattgtaccagaaggaaatttgcaaagatttttttttctgacatggcctgcaggatacatactgcatcaacagtatgaatttgctgcttctctcaaaggcaatctaagagccataagtaagaacatcacaaatactcactgtcatggttttgatcactcttactaaggtgattatgtaacataaaatcggccatgttaaatatatcaagtgaggaatacagtaattttaattacactcacaatactacataccactctgtcttaagaacctacgaacatgctaaacacaggccatactctctaagcaatgtctcctcattggtaacttctaatatactctactctaagaaacttctgtaggaagaatcatgcaagatttatccttgagtagttggtttatgtttacatgaatgatgctccacctttgctttatcatgtagcagaattgggtcacacttgtaactaaatgatatcccatcattgtatatacattgcattttatttatttaattataagtacatggattattaggctgtttctaactttttgctcttaacaataacattgcaatgaattatttgaatcattatgctgtacttgggagtattttgtttttgtatagctttttcattaatcattttattcatttatatttcaaatgatattccccttcctgattaaccctcccaaaactccccatcccatcctgccttcactgcctttgattctatgaagtgctccttcacccacttacccactcccacctcactgctctaggatcccccttccctggggcatcaagcctccataggaccaagggcctcctcttccattgatgtcagataaggctatactctgctacatatgtatctggagccatgggtcccttcatgtatactctttcgttggtggtttagtccctgggagctcttggtggtccaggttgttgaaataattcttcctatgtggttgcaatccccttcagctccttcagtccttcccctaactcttccattggggtcctgtgctcagttcaatggtgggctgtgagtatctgtatctgtattggtatactttgaggtatttttaatgcacaatagtaaaggaaatttctgatacatgataattccatttaagagccatcatattagaaagcatccccacaaaactttacattatgatcataatgtacaagggctacttactttcattaatatattttcaagatatgaatggttttagtttagtgcttggtgatttaggttttctatgtggaagttggtgtgatgaagtaaacataattattaaatgatttaaaaattgaaattgtaaggtagcgtaatgactggaaaagaagtatgcagatcaacagagcagtgtaatttctgtctatagaaggcatggaatggtataacattcgttttatgacaaagctttaatatttgaatacagttgtgtctttcattgcttcgtggtaaactagtagccatgtgggatataacatatggttccatttatctacctttattttatcagtaacgtgtctatgtttagcaacttgtttgtgtcttttattatgactaaatgcatttttgaacttgcttaacacattaacaatctgtctatggaaatatgtggaattaattgtctgtgagaatgggcattttttaatggcctaatggaagtaggaacacagcaggtcacatataatggatgactgataacatacctgcttctttctctacttactaccataacagtggtaataagtttattttataacactgagtcatcatgaaattattaaacaaaattatgttttcaaaattgaagacagtgggtgtactggctagttttgtgtcaacttgacacagctggagttatcacagagaaaggagcttcagttgaagaaatgcctccatgagatccaactgtaaggcattttctcaattagtgataaaggggaaaggccccttgtgggtgggaccatctctgggctggtagtcttgggttctataagaaagcaagctaggcaagccagtggaagcaagccagtaaagaacatccctccatggcctctgcatcagctcctgcttcctgacttgcttgagttccagtcctgacttccttggtgatgaacagcagcatggaagtgtgagccaaatcaaccctttcctccccaacttgcttcttggtcatgatgtttgtgcagaaatagaaaccctgactaagacagtgggttatatttttgtggctaattagagagactcatgaggccaagtggggatagacaaaatggccttgtaatatcccttgttgcattgtgatttcttgactgatctactacaatgataataaattgaggacatttcagtgaatgtctgatattttaaatgttactaaaagcatttacacagtcacattggcctgtgtgaagtcagacaaattattgtatttgtaaaattaacatgacctttatgccttataagtataatatgaataacttgtgagagtctgtacattctccacatagacaaaacgtcttgctcctgtgttgagctctgttgtcttttttttttttaatgctgaatgtactggatgaatctactgtacaggaattatttttccctgttgtctaattgcccacatagaatggaatctaaagttagtatagcagcagtgctcatggtaagaattaaatatgtgtagagcattttgagatcttgagaaatctgttaaaagaaactttagataagacctgggaagaaagaatatcttgttcttctagttaaataacaaatttatgaatattttctctctttcaatctctctctctctctctctctctctctctctctctcatcaaaataacaggattccttatgtcctgctaaaatattgcaaatcaacttctatgttgatcttcatatgaattagtaattccttgatcctatatcggttttccgttcttataatttatactttatttaaatacttaaaacttcctaacagcattttagcttctcaataagaacaaagtgaagtgtagctgcctgggtcctctacttttaaacatttgactttgtttcagatgaatattcactattcctatcaaattctcagtgtatgtaacaaaccacactgttcactctactttactctatggtcctcatcaaatgccaacccactggaagaacctgatgttgcatcacctgtaacagatccatccatttataagttccaattttgaagtcaaatacagcatccctatgacattttacatagttctacaaatgcaaactcttccccacctcattaatacaatgagatcttccaccagcactgatatactttctactatactattctagaattatcatttgtctttataattgtctttttgtatatttgagcttcttggattctggggtcacatactcatcatcttggactgtctcaaagtaccaataaatatcatcatgtagacagcgaatgttgaaatgaagtaaaaactttaaattgagttgaaattcacattttcatacataattgatcaaaggtgattttagggagagtaaaatatattcttcattaagtaagagttaacaaaaaacgtgaaggccatggtcatcttttgaaaagtcaagtgctaattagtgttattgtttcaggaagggatatgtatgaattgtggcctattttgattcaatatcatgttatagctattgcataaagtaaggaaaaacaaattcacaaaaagttacattttactctcactaccaaatgaaattcccaaatatgccaagatccattttatacctatctaaatgtagaaaaatgtttattcagtaatacacacaaagtatcccagtgactggcaagaagagatctatacaaaatagtgtctacttcctatttttgcctacagtatttctcaaaaatcttcttaaaattcaggtttattttatgctatatattttcaaaaagtggtatattttctatgaaatagcatatactgtataaggtgaaatatgcaaaaattattatgcacttctggaatgcttcatgactatatacacataaaacataactatgaatagtgaggtaatatagaaaactctatgtcctttgcaacaggtcagttaattagtgtgttgcatgataacaattagactataatttaatatttaaagtatcctggtaggattcatgtggtgaaatccaaacgtagccttacagaataacaagagcaagttttttatatccaattgcttcacaatagtcacacatattttcttgtcttcagtaacataagagcaaccagggttatatttttgcctatacctaacttaaagaattgaggcaggtacaaataaaagtatcatctttcatcatataaatacagaattaaattgtcaagaattgatatatttaatctactacatgtggagtagattttaattcaaatatttttatatgacaagaaatgaacatattgaccagaaagttctgacaattaattgcagaattgctgaattctgacaaagcgctctaagggaaaagtgattaaatgaatgtgctacttgcttttaaatcatttacagttgaataatttatattatatttaattcatccatttacattatccaagatgactacaaaatgagatgaagtttttaaattatcaagtttttgcattaaaatgtttgccaataaacacgttccgtttttttaaaattattattttaatggttttgtatattgaaataggagttagaaggctaagctagagtacataatataatgagttttcagggctataaatatttgacctacatctttagacattaaatgaagccctcacaaaggcatgctctgtgttcacttagggcacacataacctaattggcaactgctcagcttttctcccaaattggcccaccttacgctcacatttctgaatctaacagtctaccatcggtttccagttgttcatccaaaaacctttacaaggcatcctcaacattgttctctcacacccactggaaaatcccatcagaagctgcctatatcgagttcactcctcacaaacacctagggccacacggcatgcccacctactctaactctctgtctctcttgcctcctcccatagattgaaactgcctttagggattttgcctggctcttgtccttgtttccctttgtcttctccagacgaaaggatggaccatctagagactgccatatccagggatccatcccataatcagcctccaaacgctgataccatttcatgcactagcaagattttgctgaaaggaccctgatatagctgtctcttgtaagactatgctggggcctagcaaacacagaagtggatgctcacagtcagctattggatggatcacagggcccccaatggagaagctagagaaagtacccaaggagctaaagggatcggcaaccctataggtggaacaacaatatgaactaaccggtaccctggagctcttgactctagctgcatatgtatcagaagatggcctagtaggccatcagaggaaaaagaggcccattggtcctccaaactttatatgcctcagtataggggaatgccagggccannnnnnnnnnnnnnnnnnnntagcactggaaatgtaaatgaagaaaatacctaataaaaaaataagagttaaaaaaaagaagaagaaaaagaagctactctatgaatagaagacagaatgtatcaggcttttaaggcagccagtggcttcctgttttgcttggcataaaagccaaaggtcttatcataggtgccacagcaggatgagtactactattctggctacttctcctgcgtggtcccctagcactctctttttttttcttctgtggcctcttcaaacacactaagcatcttctcacctcaaggatgcatcagaaatttctttatgttctacgaaggcctcactattactttgactcttaaagagaaccctggaatcaaatccttaatgctaatagattgatggataactgagtatttataaaattttatactttgtataatactctgctaggttttacatatgaagatgaaaggaaaataaccttcatataagtctttgtgctattaaaaatggatagctgtgtgactatataagtaacattgtatgcactgagcagattgtatgtatctatttagaaattatatatatatatatatatatattcctaatatccacttatcagtgaatacatacaatgtgtgttcttttgcaactgggttgccttactcaggttaatattctctagttccattcatttgactgcaaatttcatgaagttgttgtttttaatagctgagtagtactccattgtgtaaatctaccactttttctgtgtccattcctccgttggggaacatctgggttgtttccagcttctatctattaaaattaaggctgctaggcacatagtggagcatgtgtatatgttggagcatcttttgggtacacacctaggagtggtatagctgggtcctcaggtagtactatggccaattttctgaggagcagtcaaactgatttccagatggtacaacttacagaccatatgaaattcaagaagggagacttagaagtgtggatgcttcagtcctacttagaagggggaacaaaataatcatggaaggtagaaggtgggagggacttggaaggaagaaaggaggggggaggaaaaaggaggagagggatcaggtgtaggaggaaatgggggaagtgtatagagggtcagaaaattgaacagaggtgtgtagcattggggatagggaacaggggtaaccaacagaaagtcccagatgtcaaaaaagcaagaggctcccaggacccaatggggataacattagctgaaatacccaacaaaggggagagagaacctgtagagaccttatggagaaattaggcatggcccctggttgaggaatgggaacacccacccttctcaaaatttttaacccagaattgctcctgtctaaaggaaatacagggacaaagtgtggagcagagactgaagaaaaggccatccagagactttcccacctggggatccatccaagatgcagcctccaaacccagtcactattgatgatgccaagaagtccttgctgacagtaacctgatatagctgtctcctgagaggctctgccagagcctgacaaatacagatgcagatacttgcagccaactaggcatagggacctcaaaggaggagttaggggaaggactcaaggagacaaaggggcttgtaacaccataggaagaacaagaatatcaactaaccagaaatacacacacacacacacacacacacacacacacacacacacacaccagagttcccagggactaaaccgccaaccaaagaataaacattgagggacctgtggctcctgctgcatatgtagcagatgataaacttatctggcatcaatgagaggtgagtcccttggtcctgtgaagggttgatgccccaccataggggaatgctagggtggtgaagcagaaatggatgagtaggagagcgccctcatagaagcaggggatggaataggggagttgtggaggaaaaataggaaaggggataacatttgaaatgtaaataaataaaataaccaataaaaattttaaaaagaaatctatatttctaatattatatattaatatatatgttccgtggggggggggggggttatcaacaactactgaaaaataggccatgaatttgaaaaaagagcaaggaagattacatggaaagtttggagggagaagcagagaggagaaatgatgtaattatgttataatctcaaagaaaggaaaagtaatttccaagaaataaatttcaagccagctggaactaatggtgtagcactcagaagacagaggcaagcgaatctctgtgaattagagtccagcctagtatacagagtgagctccaggacagccagggctgttgcacagagacccctgttttagaaaaacaaacaaaagaaacagacaaacaaaaaaagtatagaagaaaagaaactcattttttaaaaaaagaagtagatactgagttttgtttaatgtaattctttgaagtaccagacaatatgaaaaggttagatctatgacttcttggaaccaagactgactacaattgtcctcaaagaaaaacaaatagagacacatatctaaaagtgaatgtaaatttaaaaatctatacccaggcagataagatatctatatcttagctgaggtgtgaaaatatgtggaagcagtttaatagttctgtcactggtgaagtgacatatcagttttatggaaaggcagagtgaaaggaggtacaacactacacaattaagatactgtttgtcagaacaaatgatattcctcatgtctaggaacatacattacaaactttaggaaataaaattaagtcaagaaaaaacatgtcccataagaaagtgaattacagtgtggtgagcactttttataggaaacagatttccagtttctgagtatttccacgaagctccaagtttaaattagtgaaccgccattacatccagttttaacatcaaagaagtgaccacaggttaagaggaaaacttggctagatatagctacagtatttcaccacagtgtgattgcgtgtatgcaggtgtgtgtgtgtgtgtgtgtgtgtgtgtgtgcttttcattctaggaccaaatgagtaattgcagttttccatcagatagttgataaaggctttattgaaaagggctttgcttaaaagcaagctctgtttgccgaggggtaaagagacagggaggtagaagtgtctagaagtagcacaatcagaagtagcacaatcagagtgtatggaaaatgagggtccagtctgggaaatcatgagactagtttagctgtggctatagcaggagaagtaaaaaggaagaagggtagtgtgaaaaatgggcttggagttgagtacatcctgaagggccttgtatactgctgtggtgaggaacatttatttttcattttaaatgaaataaaatttagagaaatagtgttttgcagaaacatgcagaacttgtgtactagtgataggtctctatgctggacttgctagtccactgctggctttactactccaacatggctccaagctgcaaaggagtcaagtaaagactttaacttcctttctttattttcacattaaacatgataacagtgcatatcaacttcagaaatttgttcatattgtgtttaataagcctctgatacattctatcatggtctaacattccaaatcattctaaatttgtaatataatatccctgaagctaaactaaatcacatgtattgagcttgtatacagctcaaaactttactattgaaaagggggaaagcaggcatctatctgtagatgcagtgaaggctttctgacctcaggaagctatgatgagaggatcaggagttacccagggcccccttattgcccgagcttttgtccccactggcaagaacacactcaggacaactggaatcttctgcagcaaagctttattgcttacttctcaggaagaccccgaccccagaaaatggcactgcttatatagcccgcagtgtgacgtttcagcacctgatgtggtgtgacagctcctgattccttgcttgcccatcaccccattactactccccgagatgggcagtactaggagtgagttcactctcgcccctgtgtacaaggcttgtttactagttaggcacagcagaggccagcaccatcttataatggcaattgcaagtggcttgcgattgctcgtggcctggctctccataccccctctcaggtcaatggcctccaagacctttatcttgaaaacacagagttaatttctcagacaatggaggggtgagttttataaaatagctttcattgagaaaaggactcctgagggaagcacagcacctacaagcaggagaaggtcccaagatcagatggccaccagaggcatcatctagaacttaagaggacatttttgtgataagacatgttgaactggttcagttcagttgtcctatgcaagaggtgttcatgttcaatttcaggaacatgttcttttttaaattttatttgaattttaatttattttttacactccatattatgctccccaccacccccatccacatnnnnnnnnnnnnnnnnnnnnnnnnnnnnnnnnnnnnnnnnnnnnnnnnnnnnnnnnnnnnnnnnnnnnnnnnnnnnnnnnnnnnnnnnnnnnnnnnnnnnnnnnnnnnnnnnnnnnnnnnnnnnnnnnnnnnnnnnnnnnnnnnnnnnnnnnnnnnnnnnnnnnnnnnnnnnnnnnnnnnnnnnnnnnnnnnnnnnnnnnnnnnnnnnnnnnnnnnnnnnnnnnnnnnnnnnnnnnnnaacatagacacgttactgataaaataaaggtagataaatggaaccatatgttatatcccacatggctactagtttaccacgaagcaatgaaagacacaactgtattcaaatattaaagctttgtcataaaacgaatgttataccattccatgccttctatagacagaaattacactgctctgttgatctgcatacttcttttccagtcattacgctaccttacaatttcaatttttaaatcatttaataattatgtttacttcatcacaccaacttccacatagaatccccccccccccagaccactcttacctgggaggtcagagactcccaggactcaaaggaagggaccttagatgaaacacctaacagtagggagagggaacttatagagcccacctctgacagaaagacaggacattaagtgagagatggggatcccatcccatagccacatctctaatccataattgttcctgtctgaaagaattacagggatggaaatagagaggagcctgaggaaaagaaggtccagctacaggcccaaagtggatctaacccaaggggagttcccaaggcctgacaattacatattctttaatctcccattatattacttctgtttgataatacgcagacagaaaatgaatggtgaaataaattatagcagtttcatagtggtcctcttcactatttagtgtgcatactacctatcaaattttaaggagctaaataaacctgtttaaatgggctgtttcagaaactaagctgctaaagtataggagagcaaatcttagaaaataattttttgtctttttttaataatcattttcttcatttacttttcaaatgatagctcccttcccagttactcctccatattctgtcccatcccccattgcccccttctcctttgcctctatgagggtgctccttcacccactcccgcatcactgctcttgcatccacctatgctggggcatcaagcttccacaggaccaaggaaaattattacacagcctttgtttcatagtatcatactatcttatggattattgcataatatggaaatccatttgcaaaccactatgcttcataagacacaaaatgacacgcttctaaactgtgctctgtgttaagtgaaggataaagacaaggctggtaaaacgctcttccacaggcaaatgtttcatgtgctaacaaggaagcaaattaagtttgtgacaatgagttgttaattcaaaaggaacacacgcaaggacacatgctgtgggctggaaagctcaaaagttttagttccagcatctttttaaagaccttggtctggggctacatgtctttaacctcagcactgggcatagagacaggtggaccctgggagcattctggatactttgtctagctaaatggcaaggtcagtgaaaggttcggcaagagaccttgcttcactcaagtaatgcagagaagtgactgaggaattatcaatctcaggtcgctacaagcacttacatgagtgagcacagctctcaacagaaacatatacacaaattaatagttgcaacttactcccctaggacccaccaatgagcccgagtctctctgcacagaagtttccagaagggtacattccatcacagcagcatatataagatccatttttaagcctccaagccaatcaaggaatactttgaaatgtgcagtgtacattttaagcaaaaatgatatctgtaggtattctatatgtttgcttaatttaattaaatttaaattaaattgaataaacctgctttcataagagacttactgagtttctaacttatttttatggctattgtagggaaattaataactttgataataaaatgtagacaagcactgaggaggcagaggcaggctgttttctgagttcgaggccagcctggtctacaaagttccaggacagccagagctatacagagaaaccctgtctcgaaaaaccaaaggaaaaaaatgtagacaagatcagaattcattattaggctgacatttcttctcactgtgtgcatttgtaataatttttgaccacaacacagagtgatatatgtttctagtactcccacaaaatatacatgtaagatatacatggaaagataggtagaaaaactaaaagatgttctcccccttttcccattgaatttttcaactgtactgattcagaaacactgaagaacccacatgtactgtcgcaagtcttttggtaaaagaatattcattatcacattctttaatgctacgtaagactagaagtaagatcctcaattcttatccaagtttggtttgttctctgatgcaaccttcctcaagtcattaaacattttgggaacataaattctatagggcagaataaatcagtggggccgggtctccttaacaaagttgtaaaagttgaacttaagtgagcacacatgccttatgcttttattgtctaagtactctgagcagaagcataggaggagaagggaattttgtactccatatcatgctgagggcgtgggcaagagaacagcatatgaagctgcagataattaattttatatagttttgtaaattcctgaagccaactataatcctgtgcatgggccatctggatctatcagataagagacaatttatgttagtcttatacacttgtgagtaaagggattaattttggtcagagtatcaaagttaggaaaacaagccattagctattccaaaagaaagaaaggagaaaatgaaacacaatagtaacaagatagtaacatgccgaagcattcaaaagaggatgaagtcagtctggaagccaccaaaattaccgagatcctaagtgatcccccctcttgtgtgtgtgtgtgtgtgagtgtgtgtgtgtgtgtgtgtgtgtgtgtgtgtgtgtgtgtgtgtatgtgtgtgtgtcttttgttagaactaaactgagaaccttactagttctgacacttatctacagttccagaccctaagccttttaacagattcatttacattttatagacttactcctaagtagggaaacctgactagatgctactgaggtcaaagcaaacagacaaatgcatagatatatatttgttggctactagatttaatttaaacctcatctaaggttttagttttactccttgcaagagaaacagatattattttttccactaagaaggctgcaatagcaacaattggaaaatgggaaacaggatatggggagaggcaaggaaccataatagttcctctggtatcagtgtcaatgccaaattgtgatatctgattgcctttttagaatacacggtgctaagacagtctttcaaaattggcattatttggaattaaaaataaaataagttctggataaacaaaagaaaacaaaattataaaaacaaaaccaaataaacaaacaaaaataacaaaaaaaaattcctttaaacataattttctgctcagtttttataactcaaatacatttgggaatttttttaaaataattaaactgagtagaactttaacttttcttatcatactaaacaaacatgtatgctatacactcaaaaacagtgaattctaatggctagaatcactggcagaaaatctaccatcaagttttctcgtcatccttcactgaaatgccatttatctattaagaaaatctttagaaatcaccggttcactaatctgccaattcatctaacttttatgtaattacacactttactcttagcatccactgggaagaagagcagtggacaaccactgtccccctgtcagctgactgctctactgaaatccaaacaaaaccacagcaggacctgcttttacccttcatccctaagattgctatgtaatggggggaagtagctatagagaaactaacagtgttgttctgatctcccagcagtctttctcccatagcttgttttgcagatagtaggaacttttttaacaaactgttttcctactcaatgacaaatcatttacattggaaatacagattgtttttttatatattgaccaagtgtttcaaaaactaaagaaaaaaattaacatagtgatgtcaaaatttcattcaaatggattgagcttgttttgctgagaagtgacctgaaagaggttacttttgttttcaaacaacatgtaagctcctactttcattcaagtttgacattattgttttggaagctttaagtattatcatattattatgtatatttttgtattaccagaaggtatttgtgtatgcttgtttaagatacaaaagacaccttccattgggtatgcttacttatgcttaaggaggttaatgtgtctctattcagatgtcacttttaaagtttatttgaattgtttaggtgaagtattgtctaaattgacaactacttctttccaagctgacaatgtgtttctgttaatgtagctgaggggtgaatatgtcaagaaatggatgttcttaagttttcattaatcatggcaattattcctgccactgaccaagcatttaaccttacttttctactttcttccagactgaatcaaacagtattattatcacttaatactattgggatcaatagatcatacaatcatgcatattattcttaaaattccttcagttcctggcatttctgtgaaggatgacaaaatctcgctggtagattctctgccagtgattctagccaccagagttcactgcttttgagtatatagcatagatgtttgtttagtatgataagaaaaaaattaagttctactcagtttaattattttaaaaatccccaaatgtatttcagttataaaaactgagcaaaaaaattatgtttaaaagaatggggtttttttgttgtgttttgtttctttgtttgtttgtttgtttgaggaattaaaaaaaaattaggccaacatgaggtctggttatgaatgtgctttctcctcctccttcttcttctccttcaccttctcctttgtcacactccccttcccctccccctcgtcctcctcttccttctagctctgatttatttacttgcatagtttaactatgtgagtgttctttctacatgtacttctgtactccagaggagggcatcagatcccattacaggtgtttatgaaccagcatgttactcaaaattgatctcaggacctctggaggagcagaaagtggcttttaactgctgagtcatttctccagctccaaatgtacattcttcaatgatagactttttttttacaggcaaaataaaattaagagctggatatatggctccatagtagaatgtttgtttcatgtgtgtaaatttttggattatatccctggcatggagagaagaaatgaaagaaagaaaatagggggcagggaggaaaactcacttcaaaatgctaataatgccctatttagggctaagaactcgcaatcatttatttccagcactcaccagttaataaatctatgcattgattgctgtaacagagaaaatttggcagctaataatcgctgaactaaagagactaattattcttgggggtatgaacattgctaggttgcccatgctcctgtggatgcctcacaaaagcacacattcctgaagtactacttagatttagtggattattataccgaagagggcatgaagttagaaggaagatgtgtgaaagcagattcggggggagctgaagggataaatgaggagtggatatgatcatattttattgcataagtgtatgaaattctcaatgaaaaataaaaatactaacagtggtggtcacttcacatgtgaagtatgattaagaagcaatgacctgttttagtccctctgttacactacaaaatcacaatgatagtacttaaaattgtaattaagatttgctacttaggagattaaaaagaaacaattgaatgatttatctttatgaaaggaagctctatgcataacatctgttgcattttaatttattcaaaatgtttgggtcaatcatgctctcaactggcgggtggtcacttgcaggcatttctgaaaaggaacattatttaaaaatgcatgctttttataagtttggactaaacagatatgatgacatgatacatgagttaggaaacaaataagctggaattacaaataaatccaactaatctattgtaagatctcttgcaatctttgcaaaacatactgtgcacagtttggttcttggaataaacaagtgagcagacttctcaggcagagaaatgcccagataattttttttttaaaaaatcaatccaacctgtagataaaaatcaacatgatttccttaagttcttttgaaaaacgggtttcttgatgttgccattgtatttgcaatgtacagtgtgcacactaatctgataatcccatttcttatcaagtattctatctgacataacactaaaaactaacacaaaagagcatttgtctttgagaaaacatgtatacgaacccaagtttaagcagacaatcaatttaaaaattttttttcttggaatttaaaaacattaggtccatttgttaaaactggaacttagtttttatatttgcagaattgatctgaaaggaatcagccttgcaagggatgttctcttatctgagtgttcgtttctaagtggttgtccctacctccaaagtactcttttaattgttttccttaaaacactaatgtgtcatctagttgatgaagtcacatatcatgtgtttcttattaattcatcacctatatgtaagaaaaccaaaaaaggaacacataaactttggttaaaagccttccttaaaagcttccagctgtccctgtgaacaaattcgtattatagcaaagtcattgtattacaagtgggtgaccagagcccagcctaaagaggaaagaaagttagtagacatttcttctttcaaagcaatggaagagaaggccaaattctgctttcttgccactatgtattctgttgggcagcagctctccttatcagcattgcttcttctcattgtaaaagcatgctcagagtctagggtattctgagtgtagacaaatctgccacaaatgtactatgaacattttaaattagccacaggagttcttaatagtttaatcataaattatggactttttccaagctatgaaaactgtctctcatatgcacactttatttgcttctaaacatgttgatatttacttattcctcacatgtgttacattcaaagtaagctattaaaaactgttattctcagatgatagaaagaagtaaccagcatttttatttttattaggcccgacagtctatggaatttccttggagtaccacttggcatggtgctgttagactacaaagtaaactagtagcagaattttctatatcatacgaatttgtgttttcttgtgcttttttattgtcttatacaattattttctacagtgactttactgcagaaaaattatggatttcttatgtttctccacaacttaatatgcttagcatctcaatgaaagttcgttgtgtcctgtctcctagcactggattatacacaagagccgaagcatatgtgagctctgaagagactagacataaaacctcatgtttgatcattgagccccttctcaattgagctatctcccaacccccgttaaagactctgaaaaagtaaattatcacattgcctgaccttattcacattctaaagcatatatttagaatctgtttgcaggaaaaacagaccacacttttcctcaaatcccatgacacttatttcagaaaataagtcttctctactgtgccttgtgcacaaatagttcaccgaggagcttccaaagaaaagcagctggtggatggttggattctgacacctcttctctagtaggatcactttttctttcttcttttacaagttttggtggcagggatcatctgacctatgtggattttatcaaggagacacgaagccatgaagataatcatagtctcaagcttaacacagacataagcagttatgaagtggacctcgaacttactgaacttaccgactttgttttataattcctaagaagtgatgtttgaaaagttactaggctctagaagaaaaggagtatttatttctgtagctagtacaatggtagagtactaaaatcccatattttcaaaactttctttactcagggcaaaagctactaaagtgatggcagtgagtctgaaacttaattatcagcagcctaatttgcctgtctgtgatatacacatcacctgatgccagctgatgtcaacacaaattaccagcatgcaagaaaaactaattgttccgcattattttacagttattattgattgccatggcctttgcaaatcaagacagaaatagaaagtataatcattcttgaggattagtctaacagttgctagggggtggggcgaggatgcttcagagcgctcctttaataacacactaaaaccacaaggtacatttaaagaggtttgaatgcatacacataaaatctggctaaactttcaaatgtgatctttaataaatataatctgctttaaggaaatatatgtcaaatttgaaaattatattttatcccttcttcactcagagattgtcctttatgcaaacgtagcttaaggacaaaatgaaaagtaagataggtttgcccaatatgcccgtacttgcaaacacattcagaggtcgtggaggaagcaacaaagatggagacaatgtcagagattatgaatgagactcctcctcctggcttatgtgatcatcgttttcttttcaattagcttaaataccacttgagaaggcttctgtttcagtgcatttctttggtacttagtgctattgtattgcacagtacacagctaagtcaaaactctgtaccacacactgtaacaggaacaaaagcaaaagaacacatggagtcatatagtgaaagttgtttgtcacaaactttacatccgtcataagccccaatgccacctaaccctttcattccaagaagacacccccctaaacttcaccccaactaaaatctctctctctctctcctttacgtgcatttttttaaattccattctaccagcactcaggaggcagaggcaggctgatttctgatttcaaggccagcctggtctacagagtgagttccaggacagtcagagctatatagagaaaccttgtctcaaaaaaccaaaagaaaaaagaaaaaaagaaaaagaatccattctagccaagtacattcaaaaggaatgacctatggtctggtgagatggctcaataggtaaagtaggtacactcaccaaactggatgacctgagttcagttcctgggatctacagggtagagaaagagaacttatgatgtttttctctgccctccacatgtatgccatggcatatgtgctcccgacaatgcacacaagggtttaacaaaatatccagagatttaaaagtattttagcccatgatgcctaaatgggaatgtagaacatcactatgcttccctgctaaccgaatgaatatgaaaacaagacaggggcttggcaggagcaaaaagagacaagcccacacttttcaccttaggattttcaagtatgacagcttatgcagaagtggtaaagaagacctgactgggtctggtgtatgcatcgttgaataaagaaatttcccagggaagttctggcttagtcttctgcagattcttatgcagcctcggccaaggaataagaaataactatgcattgagatcttttaaaatgtatctgaatgatttcttgtggtattttttatacagctacttttaaagcaacagtacttctgagtaataaggaacacaaacttactaaaatctgatgtaagacaggatgtacatagaaacaggaaggtctatctgaaagtagtaaatggacctccactttgtagtaaagaagtcataataataatatagcaaaccaagaggtactatcactaacattgctaaaaacagtaaaaaataagatatatgtttttaagctcttaaataccatccccaaatccttgaacggtactaactaccggttactgcattttgattttcattaccacttaccatattatctaccaatcacatcctttgtgtgacatctatttcttctcagaaaagtgtgagtacaggagagtgtagcgtgcatggcagggagaacacctgtctcatagaccctcagacaaggagtaaggcttctgaacacagcacagatgtacatcagtccatgaaagagccagctgcacaacagtgaggaagcttttctgagcaaatcctaactgagaagtctgttgggttcctactgctcctgtagcatattgccacaaagcatgtggttgacaaacaacagctttgttaacagctctggaggtcagaaatcccagatgtatcttccaggacttcctgaaggtacacaaagggctgctttcatattgatgctccaaggaagaatttctctcctccaggattccagctcaaagagcagttcacaatctttagtttatgactctctctttttttcttttttttttcatattgccttatccctctgtatttccactgtcataattttgtgacggtgatactaatttcatcttctgctgcccttgtataagggtacaaatagatattcaaatataatctttctatctcagtatcttattcatacacacacacacacacacacacacacacacacacacacacacacacccctcttggtatgtaagatagcctagttgaagttctaaagattagaaaatgagcactttggaagggcattggtctgtctactatagggtactattagcaccacactctttggaagggcattagtctgtctactacagggtacatacgattagcaactcactcgttggtagggcatttgtctgtctgctacagggtacctatgattagcacctcactctttggaagggcattggtttatctactatagggcacctcattccaaggtaaccaccatagttttcttcaactgacaaaatgtcacacacctagaatcaccttggaatagtgaactcaactgagttgactccatccactagctcctggtcatgtctttgaggccatttctttgttgctaattgacataaaaggaaccaagtattatggctaatagcatccctagttaggtatgtgagttctataagaggctgaggaagccaataaaaagtgttcttccttgatctttgcttcagttgccacttcttcgttccttccttgggtttctcaaggatgaattataacatgtaaagtgaaataagccgtctccttcccagattagttttagtcaccactttatcacagctacagaaagccagcaaggtaaaacaccaacttctaatcaatgaaaacaagaatagcagccattggagaaacaaatgaaaaaaaaaaaaaaaaagattctcttgttcatttgtatggcccctagttttcttctttaagttccaaataatataccaatcatacttcaataacacacacttattgcatataaattttcatttggtcatataaaagaaccctgactacaaatgaaaaagagtaagtttctaagtagcttggtaaggtttgatatgtttctgctttgttcattctcactcaatcggaaataggagagcatatcacaacaggaattgccatgtgcaggaaatagagagccagtgttctgaaaatgacgtttcttataattcagctttaccatgagcagaaaatctgaaagttgagttcaaatcctgcttagctcaaatgtctggttgagaaagcaaattattgatttttttaaacatttaggcggaggtaagcaaattatcatgaaaaaatatattgtttagaagtgacagcaaagcatgtatcttgaaggaaacagattataaacctgtagatagcccggtacttggggaattttctctctttctccctcccaggttgttgatacttcagcatgagagacacatagcgtttcatgggttttaacaagctggagaattactttgaaatccagtattgtaacaataacctccaaattaatatattcttttcaaataaattacatttcaaaaaatgtaatctcttgcacacaaagtaacaacagaatatcatgagagcacccccagtcaaggctatgccctgtccacttgtatcatgtttgctctttgagttgagctattaagagtttaatttaaaatacaggagtaagctgcagtacttgattgcaagcaagcaaagaaagtaaatttttctcttcctctctttctctctcccgctccaacctcccgccgacttcctctcagagagaaattgccttattattttcttttcatcatgcaattgcaaacttagtaagtcaggtttgaatttggtttgggtaaaccacaacttctttttcttttttttttttttaacaagacaatgattttatatttgtgactcatttttgtgactttgggtatgactacttctttaaaaaaacaagtaacaggtttatcttgtcatcccaattactgatctatacaatttatagatgtccacaggtgtcttgataagtgacatccttctcatgatcattgcttgtgacttctttttaaaccacaacttctttggtaactgttgtactggggtaataatctcgatagtctccaatactgtgtgacttcggcttatctggagcttgtaactgtcattccggaataggtgtttgatagaagccattaaacagccatcaaggccttaaacagctatacatgagggaatctgccacaagtgctaccatgatttggctgctgagagcccttaagccttgcagcaggtgtgatactacttagagtcagtcttgggagcagggagttgacaacaatggccaaagactggagcagaaagaacaggcagcttgagtgtgaaagacagaagctgccttccccatctcccacctgtaatattgccaacccattaacagagctttggagttcacggtgtgctgagtgacaggagcagaaccatgaaggtggtaatggcttgccaggtttaaatgtagatgaataacctcttgtcagggcaaagaagtcgtttttatcctataaaaattctgtgcataactaatgagacacctgggccatcatacctgttatagtcaatttccagtttagctgtgtatctaacatgcctctacatgtggcatctaagctttggaaatggggactttcagaattgattaaacctgtaatagattaatatgcaaatgcctccctctcagttgcatcctgagtgtaatggacaacaatgatacaccagttttgaactactcctgatatccctacatcaaagatcagacttctttgattcgcctttatactgggaacatgtaaattagcttatgtctaatacaatagatggggatcctgggcatggcaagatggcaagaaactgtcatggtgagtgatttgaatcccagcaacttgttatgataatagtagcattctattatgtcactggatttggctgatgatatttcacagcaaaagattaaagaaacatcacaatgccagaacctttatgaatggtctctcttaacaatttttccacaattaaaattagtactcaggaacagtaataaacaattctgagaaagcttagagtcactccaataaagaatgtacagtgttagtctttccttcaattgttgagccaataagctcttgtttactttttgtatgttagtactaagtggtcaatagagcactttagggtagctgctgatcttggccataaagttctgataatcaagtttatcacacagagactataggagagaatacaaagtatcacatagtttctaatttcagatctattgtggatagaactctatagaacaacttcactgttaattgatggatttaaagtattttaatacagaaacaaatggacacaggttgtattattagttcatagactcatggaggaagaaagcaatctggttatatgtggagcaggtgaggcaatttcttaagcttcctcatgctcatgcccgaagcagttggcatttcatttattacccttcttattcagtcctcccactaaccctggggggggggggaagatactattattcccatttttatagaagaggagataaaaatgtggaagtgggtagatcaagtcctacagcttagagaaaagacagctttaattacatttcagcccatgcacacttatgagagtatgcctatgttccacctgtgaaggaagttctcagaaaccagaggtagttggaaattgaggatactggtcccaggaacaataatttcaacatctgtctaaggattaaggaaaggggatggcaaagacaactctaaacgtcttatgttagtggcctggaactagttgctagtccagagaggagaatctgttttcttagactttaccttctttggagttgtcaaaggattttatgatcagaaatttcttccatgtaggtattcaatcaagcttactttgtggagaaggaaagactaagattgaaggtccccaggctccttacctaattcttcttccaaataactaggtcaagtaggagatgcctgggtggggctgaggagacagactgtacctgtgcctaagggattttaaactgaagtggaaaggaggttaggtgctggagtccagggagaagagactatgtcttgatatcctacattcagtgaaaaattggagcagaaggctgcttcagcccccaggtgtcatatctatctcaatttctattacaggtgtttattttactaggacaattatctactaggtgcctagtccaacaagtggattaagagctacatccattaaagtagactgagttcccagaatgataggagatcacatgatcataattaagcctataacccgagcagacatggtttacagcgtgggttagaggatgatgacatatttctgacttcagaagacaaagagttttggaagaaaaaccaagtgtaggtgcaaggccaagaacaaaggaatttccaagtgatacttgagattttgtcatcagctttacacattcagagatggtaagaaacccataaacaggagattaaaaggtgcaaagagtatagacagggaacaagcttgattacatgggcttgcctagagattagaggcatccagctattttcttggatggtgtagcaactggtggggttttgcattgtactctcttggtgtgttaccttcagagtaggtagcacaggttgcaccagtgttagggaagcctgcaatgctatcaagatcaactcccctgattcacttgtctctcactgtatctgtccatcagactgagtagggcccctctttttttgtaaagtcagccatccaggatctagatgtgcacaggaaatccagcagtgaattcaactggcttcatatttttaaggctgtaagagatataagccaataaatagtcactgttcacaaaggtgtgagactcccattcatgactctcactctagagtttgcacacacattcaatcccctcctaccttccagcacaatttagcctcctataatgtttacagagagaaaatgtcctattggttgtgagcgatggtaaacttcatgatgtgatagaattggtatccttacaactccattgccttctagatccccccacagggaacaattttctcactactgaactatagacaggaaacctgatgtggattgcttcagttccttagtgaatcaagccaccagaggaaaacatagtagaagaagtttgtcttttctaaatcaggcttgcctcaaggaggaaacaggaaagaactgaggtaaacactgcctcccagttttaattctttataagtaaactggtccttggtttaacaattaagaatttcttcattcaagtatatagataaaaaatacattgtggaaataatgaataatttaaactatggttttattgataaagacattagcataggaagtcagcagataccatacagggatcagagtcagttgggaagacatatagaacttctcagaaactgtatttgtgagcatcagacatgctgtacatcaaatatagaaaagtttctaatgtaatctagcgccctttattgtagctagttataacggatcagttctctttctcttctttaatttcactgtggcaacatgctcgagtgaactccgacatggtacatttaaccaatttggcacaatgccttaggtttattaaacaaacagagatttgatgggctgtctctaaactctagccccaaagatatttctgcagctgtaagtactctccctaaggtgatttctcacacagctgttagaactcagcacacgggtaaaagaatgcacacacatcagtatatgtatgattcatgtatgttaactgtaaaataatggacttcttatgcttttttttaggtatttatttcatttacatttccaatgctatcccaaaagtcccccacatgctcccccacccaatcccccacccacccactcccacttcttggccctggcgttcccctgtactgaggcagataaagattgcatgaccaatgggcctctctttccactgatggccaactaggccatcttctgatacatatgcagctagagacacgagctcttttactgggtagttcatattggtgttccacctatagggttgcagatccctttagctccttggttactttctctagctcctccattgggggccctgtgatccatccaatagctgactgtgagcatccacttctgtgtttgctaggccccggcatagtctcacaagagacagctatatctggatcctttcagcaaaatcttgctagtatatgcaatggtgttagtgtttggaagctgattatgggatggatccccggatatcgcagtctctagatggtccatccttttgtctcagctccaaactttgtctctgtaactccttccatgggtgttttgttcccaattctaagaaggggcaaagtgtccacactttggtcttcgttcttcttgagtttcatgtgtttcgcaaattgtatcttatatcttgggtattctaagtttctgggctaatatccacttatcagtgagtacatattgtttgagttcttttgtgattgggttacctcactcagaatgatgccctccaggtccatccaaatgcctaggaatttcataaattcattctttttaatagctgagtagtactccattatgcttttattgcatgtctatgtatactttgatcatacttattcccacatagtcttctcttctactctttgccccatatagagtcctttcacctttgttttaaatgcttggattttgcatgtgagaattgagggatttgccttcctgagtctatctggtccactactacatggctttgttccacagaggtctctccacattttaacctgtgtttgatatcttccctccttgcaacctctacagtcttagcattgggatttggctgcagcattgaaatatttcatatgtgggttattgcctgtccttcactgtagccatcatgacttggattaagtactctgcaaagttagaaataagtaaatgaatttctttattttttccccaatgaataggcaaaattattctccttaatcacatatctagatttttcttctagagtccctgcccagagaggggtacaaataacttcataataaataagctaaaaaaataagtcagtatgcataatacaacatacttaaaatgcaaatgtacattttgaacacctagattgaaaatttaattttgtttctaatgagggattttcagtgttaacaggttagataattgtttacttccaagatccagtctagcagatagtgtctaatttttattatacattttatattataggagaaaatagtctttgaatctatctttctactatgtccaacctagaatcctatatgccaaggaaacaatgtatctccaggcttttgtctttagcaattcacactatgttcatagcagccttatttataatagccagaacctggaaagaacccagatgcccctcaacagaggaatggatacaaaaaatgtggtacatttacacaatggagtactactcagctattaaaaagaatgaatttatgaaattcctaggcaaatggttggacctggagggcatcatcctgagtgaggtaacacaatcacaaaagaactcaaatgatatttactcactgataagtgaatattagcccagaaacttagtatagcgagatataagatacaatttgcaaaacacatgaaactgaagaagaacaaagaccaaagtgtggacactttgccccttcttagtattggaaataatcacccatggaaggagttacagagacaaagtttggagctgagacaaaaggatggaccatctagagactgccatatccagggatccatcccataattagcctccaaacgatgacaccattgcatatactagcaagcgtttgctgaaaggaccctgatatagctgtctcttgtgagactaggccagggcctaacaaacacagaagtggatgctcacagtcagctattggatggatcacagggtccccaatggaggagctagagaaagtatccaaggagctaaagagatctgcaaccctgtaggtgcaacaacattatgaactaaccagtaccccgaagctcttgactctaggtgcatatgtatcaaaagatggcctagtcggccatcactggaaagagaggcccattggacacgcaaactttatatgccccagtacaggggaacgccagggccaaaaaataggaatgggtgggtagggaagtggggggcggtgtgggggacttttgggatagcattggaaaagtaattgaggaaaatatgtaataaaaaatataaaaaattaggaaaaaaaaagaaattcagatgggtccacagcagtatgaggtatctctcatgaggaataaataacatgctggttaaagattgtttatcccttcaacaaggtatgtgtgcaattctctagtagtggggtagctgccagatgtaggtgcaacacaaagtttgattattaaatgaacatgcttttaaaattatgaacatcacatgtcgatttaaaaaaatgaacagaaggcggtacagattacaaaacagttaaaataaaatgaaagacatgagaattgcaccagcaatatttgccgcgcatacctcttataagcaatgttgataatcactaagtgaaacaagcctacataaacattgattcaaacctagtcagaggacttttttctaaaactgagaggagattgtcatagagttttgaagaaacataagctttcaatgtacttttttaaagacttacatttgattacaatgaacagagattatgaagacgaattgaataaacaactgaataaacatgctgtagcctttaatgccttctatctgtagataattattagtggttcctgtaccctcttaacttgttgttgttgttgttgttgttgttgttgttgttgttagtcaaagatgaacatttgacaaaagtagcaaatgaactctttatctataagtcctttggtctttacaatggtctgtagcaaatgacttccaattgtccttatgatgaaatctatgcacagtaagataagccagtctattaaacgcagcagctgtttgacgtatctctgaatccatctcacttggaaaatgcatcctgtccacacaaatagactctatgaagcacagagatgcctggggcactgagggtgtgataagccagtagatgtgatgatcatggcaggctgctctgaggagccctgtgagcacatctgtgtgtttgtatgctgtacttctctaatgtgcctttgtctatggacttctgaaatcacccaggtgtggaagttaggtcaggttcttcctccaagccccatgctcccagaaataagactcagactcaaaatatatttacaaataccttggccatatagcttggctcttctctgactttatctaacttaaaatatcccatctattttagggtacatcctgccacttggctgggtatctgtgttcaggtgctttcaggttttctcctcacatcttcccgggtaaatcttcccacctagctctatcccataattctctcttctcctggatgtcccaccatctattctctgtctaagtcatacataggccatccgatttattattgacaggaaatgccacatccctacagacataagatattctctccacacccagggtcctcctttcaacttctgtgaattcagtccccttctgtctccatagacatggatttcctcatcacattcctatttagtatggttattaaacataaactattgtagattccacagtggataaagaaggaagtgaaggagtcaaacccttgttgcttggcttaccattcacctccttgtgaggctgccacagtgagttagcgctccctccgccatctttgagagaaaagcctttcaactgtactgcattgcatttaaggggcgtggcccaccaggagtgattctctaagcatgtccagccttttctccccagaaagtctcaaggagcataagggaagcaaagcctgacgccttggttctcttctcttggcttcacagagctgatttttcagaacgtactgcctctcctgagccttccatcccaatttactgggacgccttgcgctcaagtaacttatccggagtcacacatgggtggcttaccagaattcatagcccagaactgtcatggtttctaaatcctttattatgaacattataacataccatcctccaggtctcagtattaacatcatgtaaatttattctccagcatgattcattaaaatgaaaatgggccattttctctgattctccaagcacttcagcaggagcgtcacatcctgcatacagatttcgttcctcagaaggagacaagaaaagaagttaaacctttacttgtattggatgatggttcaacctaaaagagctttttcttctattttcactttaaaatatttaaaggagacccaggcaggattaaggttcagagtagctgcagttgtatttttagcatcctataaagcaagacagctataaagtgagggataccatggcagaaatgtgataaacccctccagatagagttaatataaaactaaattttaaaaaatcatggtatgttagatgcacacccacttttaaaaaattcctctatcattattaaacaagcgccaattacaggtgttttctcatttcctgattaaataacacaggcctcccaatgatagcaaccgaacatagcatagcaaggtgcaataagacttggcacaaactctcatatcaaggtgggaagaggcaacccagtaggaggagaaaggtcccgagagaaggaaaaagagtcagagacacatcctctcccactgttaggagtcccagaaaaagcccaagttaaacaagcacagcaggtaagcagaggacctagcatagacccctgcaggctgtggttgccatgttactctctgagctcctgtgagccctgcttagatgatttcctctcccttttctatagggtttcccatgctcagcttaatgtttctctatgggtctctgcatctgctcccatcagctgctgagggaagcctctctgatgactattgtgcctacttgcaaaagtatagaacttcacttatgggtcccagcattgagaaacattttcagggaaattgctgtgtagaaacttatctatggcagagtatcagggttggcatttcatggaatatgttatcatgtgactgtggaataagacatatatcgaaataagtataaagacaggctaacgcatatctcagtgtggggaagaaacgaactgctaatcaagggacaccacagtaaattttactctcatttaaataagatgtttattttaaaataaagcatggactcttgtagatcagggcagaggtatggaatggaatgacagtggacctttatgcaaacactacctgtctcactctcaacattgtagccttacacatgacttgttctgtgtgtgccagtgggatgagcatagctaccacactcacttcttttattaagttgagaaatgtgcaaaattaactaatcaagggactgttgcacagaaggacagcaacagtcaggtaaaataagaacattttgaaactactagggctagtgcctaccatagagaaatcctcgaatgaattagtttcctttattaagcccttatttacatacatatattttatgtttatttactgtctttgtgcatatgtgtacatatgtgtgtgcatgtttgtatatgtatgtgcatgtgtgtgagtgtgagtgtgtgtgtgtgtgtgtgtgtgtgtgtgtgtgtgtgtgtgtgtatgcatgtacacatgccctaaagcagcatgcatggaggtcagaaggcaagaagtttccaccagttattggctcaggtctttaggcttaggagcaaggagctttactctctgagccattttgtaggtctcacacccttgaactctttggttgcttgagttggacctcaagtcaaaattaagttcaataactttacatacaagatagatattgtagattgtggttattcagattttagtagatgaagaacacacaatgaggactctcatgaagcacagtgtattctggattaagggagtgacctgtgatcatgtaatcactcctcatgcttcaaaactgatctctgaatactgcacatggggaatactgcacttgactttgaagtaacttttctccatatgcaagccaacttaatatagcagagaagttcaccccagttcacttcagcaagcatttgtaattgctgagtgtccgaaatggacatttttccttatcaacatctgcattcccctagaagagaatgccgatactgttactgtccatcttgatgtttatatataaagagaaatctttagatttagtaccttttgtagatgtagtccccagccattcctaaagccacatacacagaattgatttcctggtcccggacctctggtcaccatgcaaaataaacttgtagtgtgcttgaaagaaggcaatgatgttaaccactggataaaaaatcaacacgaagcacaaccaattttttcttccttcatatctgtaagatagattcagttgcatgtaaataaattcaatatagactgtatctattagagtattgtgtgcccttaaagaaaaccttctaggggcagatagaaaacagtgcccattgtcaagcctgacaaactgagtatgggcccttagaccccattgtcaagcctgacaaactgagtatggaccctagaccccacactgtggaaatagaaggacattcacatacttgctctggtatgtaactctctcttctcttctcttctcttctcttctcttctcttctcttctcttctcttctctctctctttctctctctctttctctctctctctctctttctctctctctctctgtcgctcatctctctctgtctctcatctctctctctgtctctcatctctctctctgtctcactgtctctgtctctctctcacacatacatacacagagagtctctgtctcatatgcaagagaaagagagagaaattaactttttaaaaaaactttaaataacagcaataacaaaatagaaaactccagtggatttttttcttttttaattggatattttatttatttacatttcaaacgttatcccctttcccggtgattatagtttcctctttctctactcctcctaggtccttcctaccttccatccagacccactctctttctttctttcattaagaaaaaaaaaaaggcttttaagagatagtaaatataatgtaatacaataagataaaacaaaaactaatatatcaaaattcaacaaaacaaacaaacagaagaaaaagatgcccaagagacgacataaaaataagagacaagagacacatttattcacacactcaggaaccctgtgcaaacacacctagaatccatactatatactcaaaggacctggagcagacccaataaggtcctctacatgatacttctatctctgatttttaaattctcccatgaaagaaatcccagtcataagcatgtttcattgaaaaaaatatgagaaaataagtattttctaaatttgttctttgtagaatttcaaggaaaagaggcaacctcaaaacagcacactttcaatttacagtagcctacccttgcttttttaacttttagaagaatatcttaatgctcaggcagtagactctgttttctcagttgtgcttttctatacaacatgccttgagagagcaaacagaaagtgactgcagactgaaagcactgagcttccctgccaggaggtaaggtcaccatcacccagtgcccattggcatttcttttcgcaacagttataactccctgattcttcaaaaagtctagtattctatcactgttaactccgtagacattaaattttagggatgtggatttaataaattgtctcatcctttgtctgattggtttatctttcttaaatgagaattaatatggctagaaagaaatgacttccaccctgtgcctgtttaaagtgaaattcgctattaaaaaaaactcaaactatattaggatgaaaaatgtattatgctctgtgtttccaggcttgataataaagtatgcaagcacctctgctttcagagtcaacttttaggctaaatgacaaagcatcgtgtgttccctgaagatctgcagtaagctttacaccaaactgctactagaaaaacaaaaagatcgcttcactgtttctattatgtatctagattttagatagaccctgctattatatcttaaaataccaactgcaagatgatcttcctttcttcactataacaacaaatttctggtcccaattcagaaacatttcatcttcctaaatacacattcagtaaataagagctttaacatacttctattcggtgagcacgaggaaaaggccgttctttttttaggatttcttagatacttcctgaacttaaacatttgacaaaacattttgtgcactaaaaaggagaagagaagaatttggaagatcctttctgatgtataaaatggagctccagtgattatacattggatttgtcagagagattatggagtttactgaagagtccttactgaagagaaacaagaaagtcaaagtataccaaagtataccatattaaattgctgtattttaaatctgtgaagctgcaatgtaactagaaattccagattattttgattctgctgtggatatatacaatttacaaaagtatccaagagttatgagctatatcagctcctgggtgattaacactaggacaggaggataatcaatttgtcaatatgtggtctaatcaatgccagttaataagttctattcacattcatagtaaacaactggtaaagagtctattgtttatccatttgtgaattttatttctccagtctctactccaccaccattattatcatatgttgttatgaagcaaaagccagctctgagggcaacattaaactcttttataaggacaatttatgccctttatatcatcatgatagtggactttaaacatctttgcatcacactaggcagtaactgtacatgatgtgcacataccaagcatgatctcattgttaagtgataaaaattgagaaatatgttgggtatttataaagctaataaacatgaagaatttaattttgaaacaatgtttgaagtttaaagatacaactatggcaggtaaattctaatttgtaatcttttatttatttgcaatattttaagtacagtctgattctatagaagaatgataaaggggcttagaggatggccttccttatcaagaatcagtccagctatgaaaggcaaatacactgctttgcccccaacatgatcaactcagatccagtattttggttttgcttgtttttggatgctataatgtatgagcttggatatgtctcatgttgctccatgtatggagtactgagtactcttgggaatacatgctgtttaaaatgtacaataacaaatgtatgtttgaaaaatagaagacaagacaagaagaaagtaaacctgggctaggaaagcctagccttccaactataatgcatagttgatacttgtgaaaataatgaagaaaggaagcaggtataagcagagcaaatctgagactgaaatacaagtctagcaatgatcaggtgattgagactccccagagcaaatacccactgggaaaagttcaggttgggcagttgcagacggaccccaatgtctcaccatgctcagcctttgactgtgctaactgagaagattatagtttatgtttgaaagttgacatgagtctaaaggcataggcaggttgaagctctcaaataactgcgtatttgtcaactaaaggacaggttcttgctttagaaagtgagatctgatatggatatctccagtaccaccttactatacaaaaggagagaataggttcttaagagatatggttgatatgtgcataagagatatggttgatatgtgcatttaaaaaaagagtgtggaagataattgatttggtcactgtctgaatcctgctaaactagtcaagaggactgtcaagagttgagcaatctatttcttttgacttggaaaatcatcaatatagcattttttagacctgaacctggtctactttatatataaagtatttacttattatctttatttatatactgacactgaaccaaatatagtttattcaagtgcattacataaaatttcaccaaaacattgagaaagatcaaacgaatgcctttttttccctaagtctacacaaatacttagtaacacacaaaaatcagcagggttaaactatgttaccctcctgatctatgtcaatggcatatcttcaatgcttctccactgccatgtttaacttcttatttctagtgctattgaaatccaacaactggcactaattataaagaaacagcacaaaactgcatttaggaaaaaaaaatcaggagttgtagtacagctcagtggtagagtaactaggcttgttccctagaaagagaagagaacaaaggtgataggaagagtgattcatacccattccctacaagataaaaattggtcatctataccacttgagtgtcctactgtgttaatggcaggattatttcatatgttacacctggtcttgtagcacccctcccccatatgtgttatgttcatctttcccatgatatgttaagcctggaagaatttggtgactactcaacaacaaattaggacaaagatagggtagcacttgtcctgctaagtcccaggacccactacttgtcaatgatagatgaaaattgccttgagatggtcatttcaaagtgattatatctggtacacaagaagataatcaattttagacagacatgctgatttttaatgtctatgtgttttgaaacattgagggggctgatttagtgcaaagtggttaaataatgtaaatggtaaattgttaaaatcacagaagaagtcagaaagacatatttatacataaatgttaattaaagtttatatgtataattcagataaaattcatacatatcttcatgtgtgtatgcatgaatgaacacatgaatgtaatcaaactttaggacacaaacctagacatctgctatctgtactatatctatttagccagtgttatataatctgtatttctcgttcctagcctaattattgcttgatataatgatcagaaattacaagaaaggcatccttggaaggctgataagtcatccagaaaattagattagcatgatcaaactataatggttattgttactcattataatacaccacctgaaaagttgaaggaagagaaataaattggcatcactgagcaattatagtcgtccatggtagattttacagatgatcactagttatgaattcttttcatatccaaaactgaagattttcatacattatagcgccattattacagtaatcaaagcccgtttatttgatcatcatcgtaatggagtacttgaggcattttctcctttgctaattgacagttggtcagttaagaggtgcttttcacagaatctccaataaccctaagggtttgaatgggcttgtaataaatgcctaagacgctcctctagtttcctaagtgcatttgctgcaactcatgacggctattttccatgttctggtcaggaaatgcctttgatctgccatccaactgcctctcgcattgttctctcgatcttgagcattgtaaccctactcatcagaactgtgacacattaccatttagttatcatcttctgacgccagaatcttctttaaaagaaaagaaaatgcagagagcaggaggagggtcaaactgaacctcagattgccttgtttgaagaattgcagtaggtgatgtgtagtcagaataccaaagcttcccacctggttgttgcttccaccttaattgcaaaccgaggtgctttctgtgcagacttttggctcacttccatgatggagcacccaaacccgactccagaatccaacatcaggaatgcaaaggcactcctttcaatgtcattctcccatcattttctaatttggtggtggtagttgaaggagggcacgagaagtgagttgcactaaatcaataaacaagttgtttgttgtaaaagagtatacaatgcataggtttaatatactcaaatgcatttaaaatattttcctactacatataaggtatcttagcagggactttgtcttgcaagtttcttccctttcctagcacctagatgtttggtaaatcttgataaaatgaatggatatgtagagaggtttgggctaactcattggattaatgttctagtatgattccttaatggcattaattttttagttagtaaatatttagagaacgtttttacttgtgtaaactgccataatatcaataaggtaactaattcaaaatcttgcagccagagtggactggaagaaaatctatggggaggctcattggcttcaaagacacaacacaatgcaatgtacacttcataaagaactgtacacaaatagctatattgggagattttcttctttctttttactcagtaatatctactctaagttttgtgtgctatatactatgtggtgctaagacacagtaagatataatagttcttgtccacagataaaccatgaagaggcttattgcccacttccttctgtttgttctttaattccctttggttttctttcctttttacttttattacttctttcctccctttctcatgcaaaaaacgtaaatatcattcttattctctcttacatgactctagttaatttgcaaaagtcagcaactgagagtcttgtcttcagctgatggtagcttcctcactgtgtgttccagtgttcaaaataaatattttgcaattagggtgaaatatgttactgacagcagcagaggctgaaggcttttatttattcagatatccatttatttcccaaatagcaaggtaatggtggatcctctagcttatcacttcttctagatatgcacacataattaaatctcgatgtgcctacattttgctttaatctctcctacaactgcaagtaatgagaggctcttgaatgtgactttagaagataattcttctggaagaagtttttagctactcaatatgaaatgtgtcctattacaaataatacactgcctgaactcctgtgttgacttcatttgaactcatatagctcagcttatatgtggaagaattgggctcctgagcaaagggagcattttgcaatgatgcacagagtttatatattaatagtgctgtagcctaggtatagtaattaacctcagctgataagatatgcatgctaatccagattgtgaatataattgctgctgtagcttttagaaccttggacaaaggaacagaaggtgtccattttaggaatattcatgtgctttttttctaatctcttgtgccccaagtcacagtaatgtagatgctcattatcaagatatttagggagatatatagggatagcaatattcaatcccttgcaatattgtttaaatgtggtttttttctttaagaatttctattttgttaatttattaataagggtaatatgaacaaaatggatactaagacatgtcgcataaaatgatcgtgattaaatattctttccactttgcaggaaggcaaaaatgccaatcctgctatttcttgttttgtcagagactcaagggctgtaaagcaagcgtgtagaactggggcaactcattcatgaatactgttgttcgtgtctgacttacacagcaggtggggaggctgatgggattaactgctgatggaaatatgggttctacgacatctaatacagcagctcacatgtcaggtttggccagtgcaagtcaaaagctagattgttacttgcatgcatcttagttcttgtcagttgtaactaccacatagcaactgccaagcatattagacagcacagacaaaatggacaattttccatctagttttcaaagcgacttgtcttatggtagaaaatagagggctacttttagtcaaatattaaccaataaagatacataactaaatacgtcattactcaatatttatggaatatcctaagatctactcaccaaagttgttttccatgctacattaatagtcttgtaagaaatctagagataaaatccatctatttgtccagcctttactattcctgtctaaaagaactgcagggataaaaatggagaagagactgaaggaaaagccgtccaatgagcagccaaacttgagatccatatcatgggagggccccaaagcctgacactattactgatgctatgctgcttatagatgggagtctggcatggctgtccactgagagatcctaccagcagctaactgagacagaagcagatacttatacttacccagccattgaactgaagtctgggaccccatggttgacttaggggaggaagtgaaggaactgaggggagagtaaccccataggaagaccagcagtttcaacttacccagaccccagggagctcccagagactgagtcaccaaccaggagcatacacaggccagtcacaggcccccagcacaaatatagcagagatctgcctggtcaggtcttaatgggagaagatgcacttaattctctaactgaagccccagagaagagggagatctgggggggggtactctattgggggaaagggggaagagaaatgagatgagaaactgtgcgagaggtgatcaaggtgagagggcaatgaccggaatggaagaaagaggaggggaaggaggaggaggaggaggaggaggaggnnnnnnnnnnnnnnnnnnnnaagaagaagaagaagaagaagaagaagaagaagaagaagaagaagaagaagaagaagaagaatcttcaagaataaagaagaagctaaaacctgtgcaatattagcaggaatacatcaagaacaccttactctattgcatttcatttcattttataaagtttgagttgtagttaatatattatacattgagaagcccattaatcttttgattagcatttgttttcttatgttttcctcagagacaaaccagcaaatgagaaatgttcttaatttgatctctggagtaatcataggtatggatattgtagcgtttaacagatgtgccaaacaaatgagtcggcttttgaatgtacatttctgtgcagcaagaatgcaactgccttctaaactgtgcttgagttcgagggctgaacttaatttctgatctagatgtagtctcctgatcatgtatagtctcaggtttttaaaatagtagttaaaatgaaaggtttttttgtttgtttttttaaaaaatacttcccagctgcatttaaactcatgtgaaacctgcttttcaaaacacactattcaaatgacactatttttttgttcccattcacagagttctcacaatcaacagccatttgcacttggagaccctgggtatagcacattcccttcttcatggacctcttgcaggtgtagctgatgcaaaatagggagtggtctttaaaacttatattatccactaagtagctcctccccaaagggaatcttttctctatttctttgtaccactccatcagtacacaagtaagtccctgacccacatgacccccttcacagtaaagcaaaaatggttctttatttggagttccttgttatactacaacatgtgattaataaccttcttctctgaactgctggccatccagtgtgggagcagtggaggagtgggatgcttgtcagaaaatataacccaagcttctgacatggaatttaaaaaccaggacagaaaacacctcatttgatcatttgactttgttggtggaaggaatctcttgaatggaggttgttatcctcaaaaatgggtacaattcaagaaaaacacgactagtcaccaggtactacctcatgcagtcagttcttttgccccctttactcttccatccaaaaatcgctgcctgcatgcgtgggcccagcctcatcagaccaccacttcagagacacaaaattagagattcaagcatacagacaaatttagttgctgcttattaatacttcacaaggccttaagtatttcatttcattatcattttctttgagtcacactctatatttttcagggaaagaacttcttactcattttatctgatctaaaaatacagatatgcattaagaattccaggcagcattggagatgaaagcaaagcaacagtatgaacgttgtgtggttataaattgggtgaaaaaaacaagggtatgttttgaaatagggaaaaataaacacctttccatttggggatacctggagtcagctaaaatttgatctttatatgaagtctttaaaattgcttaaaacgtgtatgtaactgtagcttccaaaattgtaatgattttaagatttccggtgtactgtggggaaataaaattggcctgttgagtgacacaaaacattattacattctttcatttttggtaattatttaacactattagctatgctgaaagaataaggtcacgcgcactaaatgtctcaacaatatcttcctgggttttccccacaagagtgtcacactccccttagagattccttcacttctacatttgatcctcagacaagagtagaagactttctcctttccatagtgtcactttaaagccactaacaattccatcaaccagtaatctgccatttattcttttttttaaacagactcccatactgtagcccaacaagacttcaaactcaggaggtcctcttagctcagcctccctagtaccagggttacagaccaggaccaccacatctgacacaaagtccttattcacaggtcctcactcatgtaactttttcctatacttgataagctgtcggagttcacatcagtggcgttctgctccatgtgggcatgcagctggctccctttccatattctctccgtaagagttaactctgggagttgaagaaactggggttgctggtgaaactgaagcaagaaaatccagggtatcccagtggctttcaacattttcacctaacactcaagatgtgctagcttatgcacagttgtgggtagcaacattcatccacctgaacttagtggcagagacgtactgtagttcatctcctgctctcattacaagtccactgcagggttcttgtattctaagtcaaaatagttgactttgtcctttgtgatcactcagggatttgaaaagatgtgtcaccaattattgactttatacatgtaaccaacaagttaaaagagctggtcagttctcctcaagtgcttcttttttctattctctgacacaacctcctgctccatccttcttgtttgcctttctcaggtgcccttcacaaaggaaggagtgagtgctttgtagagcctgacacctgcaattgaatgctgcagcccaagtctgacctgtatgactgtacacagaacatttggaaaatgtaatattgagctatatacaggcagttagatgacaacgttagtaatgactactggggtgtcctgttctctcttcttaacactgatctcacactaacacacactcctcattttcaatataaccatttaagtgtgctttgactcaaagttcaaaaattctgaaagtccactctgtgatgcttctactttcagctttgtgttatgacagatgtgagatggaatgaagactatggagaaagagtacttttggccagcatactggagactctaggtttaacacacagcacaacagagatagaaagaagaaggaaatagaagaggggagagacaatagttttgatctttaagatcttttgggacaatgagaagattagataactaatctgaaatctgaaaagataataattactaagaatatagataattggtagaggaagatggataacagatagagggagaggaatgactgagcaattaagagcactaactgctcttgcagaggacacaggcacagttactaacacccacatggctcacaaacatcttatccccaattccagtagatctgatgccttcttccaacattcacaggcatgtacatcgtgcacatacacacatgcaagcaaaacaatattactcataacattaaagaactattttatttaaaaagtagcatagctcaagatacaattattaagagtacaacaccctaacagcaatggatgaagagagagagagagcctatccttactgactgggcagacaactctgaatcagccttacagaaaggagagagctcacatggacagtgatagcaacaggtagacatccttgaggaagagatacacccctcagcagtgtaaataacatgggctagaggtgaggggagagttgttgactggggataagtcatgaaaccttttgtatataagttatttttaagcagcagaggctttgaactcaaatggcttctttcttaactccctggtatttttaagatgtcatttacatttttattgacaatatgtggtattttttaggaatgctttttgctgtctaaactgtgaaaattgtcttaaagttaagcactagttgagctctctaccagtgtgttttattttgctatttactctgtcagtgtagcatacatgttatactaggacaagtgttctgaccaatcaagtgtctgcttcttggatttaacatatacatcagtgtatttttattcactcacaagtataaatcacattttatacctgaaaactttaaaaaatatgtaccttaattctgtcattttaaaacaatcatgagacagacgaactaattgccatatctgtcaagcatgtggctgtaacagctgcattttccccagacttgaaggtatcactttgccaaatgcagctaaaatatggaaaataatatgatttgtcatcttaaagtatgcgtaaatgttcaattttgaagtatctataaattttgacacagaccctgagtgaaagttacttgcttagaaaataccacatttgcaaagctggcctcacaggattataaggaaaacattgttagttttataaactttatcgatttctttttggatgacttgaccacctcatggcaacaagttgccctctaatgttcatcccttttcaatatccagataattttctacaactaattcttttcactttacacctttatactgagctaaggattctgtcaatggtttgaagtcaatcagcttagttaatttgtaacctatactagctctttgaattccacagaccactgtatagattgctttagtttacattttctttgtttttccaggttgtgttagatggtcatgttttctttcatatttcaaataaaataaatctgaccatctgcattataaacttgagaatacattctcttcttgtttgtctcttcatgtgtatgttgatttgaattggtgtatatgagaacttttgccttcagttccagggctgcctcccttggctggttagaaggaggagcagtatcaaagagagacttagcaattctcagaggtaggcccatagtcacactactaagttgtgttcaaggggcaggtgtgaactagaagatgacagacagacgcaagtgactggagccggcagcaaagaagaaattgtaggaagaaagcaagatctcccaacagaaaataagcagaagtcatggatctgtcaactatttaacctcatcataaacactacatcctgcctgcaatgttcctagagtcattttaataaactaaagtaaaataaaataaaataaaataaaataaaataaaataaataacaagggctctgccattaaagcaaaagtggactggaaaatatcgcaggccatttgaaataattgttacagtagctgcaagctttttaaaaagctctgacctctcaaaattgtctttttactattatccttttatttcattggcctacttatctgaataagttatataattaactacgcttttttctttataaattttgtctgaaactctcatcgatgcagaagttagatgatacgattgtcaggcaaccactgaacagtcagcaccagaaagaggatagttctaaaagaagtggagaacgttcttgattccattcttgtcttcatccataacaaaatagaggaatatatccttaatgtaatctttattcccaggtccattgcatgataaagagcttggctttagagggcatctacttccaaacttctccactcgtctgtcctgcccacaggccttgtagttctttcaccaaggagcataatttgattattttcttgtaagaccttctatacaaatttagcatttctattcctctttttgttgtcatattgctttaaaattgtaacttttgtcctcccaaaatgctaagtgaccactataaatgtactcagatgaacatgagagatgctgggccatttgtacttcctccagtaccctcacttggactgagagaatgatattgcttcaccttcaacacctactgaaccttaacaccttgggcgtcagagcaagttagagggtgcgaagcatttgcacgtttctcctatttaatcctcaccccagcctgtgagctacgcaaaacatcacgattctttattacagaaaaatctggggctggagaaataatctctgcactctctcctagtggtaggcctgaatgtagtcaagcaggtagatctgtgtgctgtagatctgattgtcatgatctgagtttcatttcagtgggatacataggctatacatctgataaaggcaagtttgggaataaggagagcagctccatagaaagttatcttaaaattcagggaaaatgatgagatttgacgtatgcagtggtgatggcattgcataataggacacaaacatagcattctacttgattatgaaagctccactaaaatgaaaaataagtaggtaaaagctaatgcagttggcaattagattttatacataaatggaaacttctgtgcattacaaaagatatttatactactaacacaaagcactagactaaaaacatgcaggagtatacttaatcaacatatatctttattcattttatttataaaaattcatcgataaggcaaatttgtagagaagacttagaaagacgttggtcttactttagtcacgaccattgtctggcagtattttacatcttctgtttataactgtatcatgttaactggttgccatgatcgacagagacagaacagataaagttcctatcattcctatcagacaagacctgtttcacctatttatagtggcagttcctcaccacattactaaccttcccctctttctacagaaaaacatgttcctatttctgctaacaacactcaactttgcgctaagccagtctcttttctaggacacacttctataattttgccccattgtctactggcaaaatctgaacttgtctatgctatcattcccctcaattatgaattgatgcctcgtatcacttccacggaaatccatttcttggtctgaaactatctacttcctgtctcattctctgtccacattgttttccactctgtacaacaatagtctcatctacattcactgtttccaccaagtaacttctaggcttgtcacatgtacttctgatcaaaatttggggaccaccgtagcctacggtagcacagacattcataaaatattgaaaaactgaatttctcatctttctaacattcattaaagaaaaattcaaattctttcatatgaatattcataggatggtttgtattaattatgctttgaataataagactatttttgcttataattaccatataattgatatgatatcatttcataaagtttggcatagcaagtagctctgagattcacttagagctgtcagacagacttttacttgcctgttggctttcgttccttcctcctctttcttgatttcatttgtccttctttttgctttttttaagtaattgtccttactgccaacacagatggaactaagttagatcagtcaggcttaaatgatggcagtagaaacatctcaacatggtagctctgtactaatctcctaagttatttttcaatgttttgaagaaaataagttatacgtaattactaaataaacttgtaagttctagcaaactaaaatgttaaaaaaaactaaaatttctgtaatggcatctttagaaaagactaacgtgtgtcttgcacttttcaagttgcgttagaattttaaagcactttgtgtaagtacagttttagccatctttagtttgggatatttaaatcaattaaaattgcatgtgattgtctgtctttgtactaaattatgaatagtacatattcaatggacataacaatatatattttctcctaaagggtaagcacatgatgaggcatgatgtggatacatacaaagcattacattaaattagctctgcaatagtcaatcagagagccactcctcttactctggcacttcaatatgtagcaggctgttatctaagtgatgaatagcctcgcaaagcataaaaagggggaaaatagttccttcttatttacttaaaattcatattgggatttccagagagaactctgaaaatacaaaagatagtagtttgtggctcaaacaatttaaacgcctctcaacctctaggaactgttgacatgtaccatgttaactgttacatataactcactcacatgtgagagacatgtctgagaggaaaactggccagagaatacaaaataagcaagttgtagaaatgaaagaatgagtgaatattttccataactgccttcctgatctataaagggagtctaccttctattggagggtaaattcagtttggcaattttgtgatgaggacatacatatttatagaacttcttccaaaataaaaatcattttttgtaatttagtaacaagatgatggcagttattacaaatacactgaataaaatcatttattaactctttatataggtaaagattttttaaaaaccttcaaagtctatcaagaattactttggaatcaagttcctattgactataaatagaaggagaaaaagcactgttataattgttcaaaactaatcatattagagtttgcatagaatacaactaatattcgatattttcccaggttcataatagttggagtgggcttgaaactggacctgtgggtcacattttcaacctcaaaatctttttttatactatctgataattaaaaggatcatttgacactcaatgcacagaatatttttacttgcctatgtttctgttatttttaatgttgatgctatgcttaatgtaaacaacacatcttatatgtagaacaaaatgctgacctaaagcttcatggagagaaaatggaagctgtacaatgactggcaaagttagtatcatctgggaagaaaatcaaagtgcaacagagcaaacatggtgtaaccattgtagagcatatgctggcaataaagggagacgatgaaagatacaaatacatgctacgagggaggcaagtaggccaagtgttatgtagataaggaaaacaagcagaatctgaggcgtgagaatgcttgtgactttggaatttattaataacaccggccagtgatttattagtctgttttccataggtaaagctacagttacaaatgacttcagaatctcagaagcttgcagtgtctatggcatatttcttccttcattgctgtggtcagctgtggccctggcccatacatcttctcatactggagctggctgaaagaacagcacatattttatcatgtgtcctttatataaacagaaaaagcaagaatgtacaagtgcacatgatggctttctcacagcttcaagccagtgtgttctctgttgctctcacatttcaatgccagctcatgtcagaatgcaaagtgtggcatcatagaaatataagtcagacagccatgacatgaggcatataattctttcattctgaaataagaaagaaataatggatacaaatgatgcaaactgctctggaaatgattttttccaggagtgttttccatgaagaatgtgtactccaggcatatctttaagagttagggcacacctaggtcaaaagtcaaccatttatgaatgatcgacagagcattagtaatgaattatttgtcattttgctagttaaactaacagaaaagagcaggatggccgttaaagtaaatttccatatgttcataatttttatcatgagggtacaaagaaatatgatcataacagtgtaaagcttaggagagaatcattagaagtgtactctcaatgattgctaaaacaaggtgataacataattattaaagatccatattgttatttcagagcaactaccaaagtaataacataaaggaatgcagcttccatcccaagaatcattagatgagataaaataaaacaaagtttataaaattattaattcatcaaaaataaataaacaaatattaaagcacaacatggaaaagagggacaaaatgtcatgatggaaaatatgaaccaaacacaagcatgctttgaaacctagtgtttgtatactagtcattaaggtggaatgagtgactggacactcgtgtttacacaaaattacgcaaactggggtttttttaatgactcaaatatatgttgtttacaagaaatgccttttaataatttttatgaaaaattaaaatcaattcttaaagagagactcttaaacaaactgaaagaaagagattaggtatactaaatttgaaacaaagcaaaagaaatcaggtgataggaatagaaaagtcaggtgactcatgattggagagtcttactacattccagagacatttcagaagattagtcaaaacacaaagaacaagaagcaaccttacagtcaccaatatggatttctgtgttcttctcactagcagataccatagaaaccaaaaccaccacatttatacagacgctgagtaacactatcagtcatgagctacttaacatcagtaagaaattattccccacaagagctacatacattttcgaagaagcaagttgtaattcccaaggtgctacatagaccttgtcttgaactgtaaaacaatatttaataaatttgaaaatattaaataatgtttctattcatgacaaaataaagtattgaattgaattaataaaccaaaaagtaaaacaataaacctttaaagatgcttaaatattggaatcagaaacaaaatagtaagtaatccatgggttacagaagaaacttcaaaggatgcataaaaatggatatttcaagggaaatacagagatgtcaggatgtgtagggaacagttaatgcaacttgtgttgggagattagcctatagtacctctattagaaaataaggtgttaatgaatttgaaacataatgaactacatcctaagaatgtagcacaaaggaaagaataaaagtaaaagcagaactcactaaaatgagagaattatgttccatcatgcaaaaaaaagtcaaatttatgatagaagtcattctagtacatctatactggataataacaagcagtggacaaggcatcctcttcctacacttctgtctcttttcagtgtagactctgtatactcctaaacgaagtatgcagaacactagaaaagaaaattaaagttacaacaaagcatagcaagtacggaaatgctgaacataatagaaaacgaagtccagtaacatattaagaagtcaatatactaaatcaggcttcatttttcccaagagtgtaaggttagtttaacatgtgaaaattaatgcatcttgtcacacttacagatcaagagaaaatcacacttgggggagaaagattctcagtcttcacatgaaacacgaaattcaatttgaggtcgatcaaaaacctgagcttaaaactaaaccttaacatttataaaagcagagaggtaaaacctttgagtagaagtctttctaaacgtgacataaaaataaaagtcatgaaaggaaaaccttggtttcatctaaataaacacttctgctcacatttaaggaaggaaaaaattataagacgtagctgggcaaatgttcatatccaaaatatattaacacatctccaaatttgagaataaaagtaaaacaccatcagccacaatattttacttcgtgacagtaaaacttctactgtgaagttcaagagacttagaaacatatgcatgaaatgctgttcataggaatgctggcgggatggggacagtggctcaggaattaaaccttactttctgggcaagcatgaggacctcagttctaatacccagaacctacatggaagcccagccatccgagtcacagtgcttctgtgtggagatggaaagtggaggcaggagaaatgcctggatgctcaccagccagcatcctgaaccaacagtaggagaaacaaacaaatacaaaggaatcctggctaaaagcagaatgcaaagaccaaaccctcaggctctttaaccacttgcataggcagccatggtacagtgcacacctaaattcacacacagaagtatacacataggcaaacatcatgtagaaacacaaatcatagctaaacctatttataaatgctttttgtcaataaatgtcaaattataatttttatctttttctgtcttcctcccaatgtgccccagtgtgtgtgtgtgtgtgtgtgtgtgtgtgtgtgtgtgtgtttgtagataaaactcatagactcatgcctactaattacatagtctaccactgagctctagagctacactgatgcccagtaatagttaccagttaatagctccaaatgtctacttgtcctctaacaggagaatggatagataagtgtcacatagtatttaaagtaatattaaacttctaagaatgagtataactaatacactccaactacctgactctgaaaatcgtgattaaaagatcatcccagagatggtatgctgtctgtttccattaacatcacattctggaacagttaaaattagactgcagtgacaaagaacagatgcccacctgcccacatatgaacagggcagtggcaggaagtatggtcacagggaagggacataaggaagcttactaagatagtagtagatggctcactatgtctcgatattattcttcaaactcaaaaggttgcctttagatctgactgtgttgctaaatgtcaatttctgctaggttcccaacaaaatgaatattgaaaaactgtttgagtatcctcctccacccccaccccaggttaaaagcattataagtggaggcgtaacagtgagataggcagagaacagggctctgggtccacgtcagtatgtaggagcagtgaaaacacctaattagagccagaacaacgtgaagatgaagtaatgtaactgcccttaggagaagctacgagagcagggagattagaagtggtagatccaatcacttcttatacttttccatttccaaacttccttaaatggaatatgtaggtttccagtcaagaatagtgtatcaaatgctaggtgtcttcaggagctaaacctttcttgtcccttgaattcctttcaaccacttgtaaaaaccctgttctattaaataaaatgattattctactttacagctcaaatagaagagtttaaaatgtaaatgcactgtgaaggtaaaacttaggggaaattttgcatttgttcccatgcaatcattatacggatacaaacaattaagcatttatccttttcattactgtttctagtaatgtaggaagaaggcaaaaaagcaaacagtcccgtgtagtgcacatttactgagcttataacaggtgctaaatcagtggttcgccagcttgtatgtctgtgacctttattaagaattacagttcctgtcccagcctctgtgtaagtacctatgtatgatgagaaaattgttatataatacagcttattcttgctaagtaagacacactgatgttctctagtctagtgtagactgttacaatagctccaggaatattggctctgactcacttacttttgctgcccactgatagcttgtgcattgtgttttgaaatgttgcacggtgctgctctttctcctaaaactgtggtctgtgggacagcttcctcagcaccgtgggctgtaagaaatgaagaacatgaagctgctcctcacacctactgaataagaaagactctgtattttaacagcacctctagatgcccctgtgcatttctggtgccagatgatgaaggtgctttatgctgccgatatcttctgggtgttgtggcagatagaatctaactcagcggtccagcttgggggctttgtttttgttgtttaattgttagaaaggaaatattttctttagttttcttgtggatgactttatgtgttcacattttatttgcctgcatttagagtgctatgtcttactctgaattattcctccctgtgagaaaactgccaaacatggcatttctacccaaaattccctttccatggattatagtgtagcttcaggtaagagtgccatggccagtcttgccgagtcagcaaaatgtgcccccgcatttcttccaggagatacctaagccaggatctcagctgttgaagtcagtggccctgctcctaagtgctttctcccatcattaggcaccttcccttcactgtggtatgtttcctgagtggtgggaagttgtagcctgggagttgctaatcctgctaacactaaaaggctcactcccattagcagcttctgtgttgcattaataataagaaagtaataaagataccagtctcagctctcattctcccctgaggtaaggcctcagcttctctccaatccccatggtccactctaatggccttgctgtactagagtggtagggtagattgatgtatctattgtctttttatcagagttaaattcctttttccccagaagctcagagggaagtttttccctaaaccttgtatgttaaaagcaatagcatcaatacgtttgccatgaaagcgagccatttaattcataacttaaacgcaagttaagactacttctcacactgaaaatagagagatagcattggaacatagcaagaagcacaaaaaacttgattaccttagagtccattcccagatttcttgacagagccataaaatagaactctcccacaggcattctgggccctttgtgtttgattattcatgaaatcatttctcttcacagcaataaactaaaatcaagaaagatagttagttttgtaaatactaaaaaattattaactgccaaagaagaagtgaaaaaatgaggagaaatgatagtatagcaaaagaagtttggacgtaaggggccaagagtgttagtcaattattttttcataagatgttcctgagatctgtgaaggagttaggctacctttctgttgaaatcatgtggtctctggccaaaggtctctttaaaaatcatttggtgtctagagacaatgggaaagtatatgttctgtctgtgaaaactgattgtatttgcactaatcagattgctatattgtttcatttgtaagtaaagctgggttttttttttttcagctttcctgctctcactgagtacacagtagtccatcactgcagaggtgttactcagctttgcagtcaaatcagtagattgttttttctttctttcttacatcattttgtgctgatcttgtgatgctaatttttgatttgtttgattttgccaatttcatatttatactgtcaagcaaaaggaccaatatcaaccagtagctgctttaatattgtaaatacaattttgttcataactcaagataaccatgtaaaaaataaaagttgtggctggagagtggaatcaatagttgagagtcctttctcttttctcaggagaaaatgtctggtggcttaccaataactagctctaggagttctgacaccctcttctggttgctacaggcaccccaactcactacagtgtgtgcacacaaatgcatgcatgtacacacacacacacatacacacacacacacacacacacacacatacacacacaaagacttaaattgaaaattatttaagtgagttccaggataaccaagactattgaaagacacactatcttggaaaaccaaaagtcagaaaatgaaaaaatgcaaaatatttttcataaatatttatagagaccagtgtaaatcccttttaatgaaacaactcttatatttattagccaagcagttttcaaaaccactatatgcactcttgtttgtggctgtgccacatataaaaggacaggggcattcactttgttcccatgagtacacatccacagtgttgttgatgtatcttttaaactgaggaaaaaaggagagaaatgtgccgttttcgtggagtccataacaagcgaacccatctggaagcagcaactgtgacagggaattctcccagcattgttgttaccatgcacacctgtctgcatgcccttcacgtatgatttctgtcccacagtccatgaaggctctggcgagaccagtcagaaggagacatccacctgtgacatttgccagtttggggcagagtgtgatgaagatgctgaggatgtctggtaagaggctactttggtttctcaaaatgatgtcagtgattgagggtgttgttgttgttgttgttgttgttgttgttgtttgttgttgtttgtgttgtggctcagtaactactttttcaaacatcacgttgttagagtttctattttcttctgacttgccaaggcagtaaggagtaagtgctgtagtttcaggagccaggttgtgaggtggttcaggcaagcagatgcttgcataggaaacagaactgtcactgagaaccccaaaatggtcagtcttactggaaagaaagggaaaccatatttatgagaatgtctcttttaaaaattccatcaagaaacaacagataacttctaagtttctttagtttggaataacaaaattaccacatagtgagtatctgaaaatagcagaaattgatgtcaagccctcttgagccttcaaagtccaatatccactctgaagaagacatagcatctgctgagggtctgcctcctaaaggcagtacttgcctctaaagggtgagatacaaagaccaaggggcctctatggtcttcttttatagaaggattaataagttaattaattagtaagtaaataaccaatgaggcttcaggatgcatgacataatcaccttccccaaaccatctcacttatacaattcaatgtgcagaatttagacatttgtgttaagagagtgttcaaaccacagcaattgctatcataaattttaggattgtgagtctgaataactgcagatttaaaagaggacacatgtgcatacacactgacaagctgaaaagacacttcagccaaaacaaaaaccataacaaacaaaaccaaaacacctccaggctgccctcctgcatcaggttttcctttcctctacagaatatcccatttctctaataaagttacatgaacaattgataattttcgttactttgaatggatgtcaagtatttcgctttctatatcacctgcatgcattggtcctgatctgatcatttaacaaagttcattgagttagagcacagacagttggcatgtctggatattgaagaagcaatcagtcttttcctttcactcctcttctcaccataaccactaacaccacatcctcctactcctactccttctcctccttctttccctcctcctcctcctctccctcttcctcttccttttcctcttcctctttctcctccttctctgcctcctcctcttcttcctcctcctctatttctctccctccctctctcctcttccttttctttccttcttctcccatcttctactgtctccctccctttctctctcccattatctttctcttctttgtccttccttccctctcttcttccacccctctttccatcttgctccctcctttctttctctctttcatatctttgctgaaaacagaaaatcattctaatcttcaatatgaaaaactcttcatcaagagctactaatagtcattttgataagcttctgagagtagaaagaatctctttaaggaaagggggcacttctcaaataagaaagaaaatgatacattggcagaaatgaaacacaagacacttatggggcattttaatgtagaatgaggtaaacatttcatctgagtaaactgggacacttacaagtgaacactgccaggaaacagccagacagaataaccatctatccataaaagtagacatcagtagcctttccagatttaccaaacaccttgggttactatacagcagggggtcacatctgtgattcacgcactagctgaggcatcttgaggaaatgtgaagtataatttcttcagagcaccccaggcatcttaatgttgataaatttatagtccaaagggtaagagatcatcagaatttcttttgagattctctaaactttttagtttcaccctaaacttaatgaatcaaaatttcagtgaagtggaacttaaacttagtctttttctgaaacttcttaaatgattatggaaatgctgctttaaaagaaatgactgactaaaggaatcattggcttcatttctactttcccatcagtcttcaggttgtcaatcattttcctttataaatgggtgtacatggtggggggtggctgaaacatagctcagccattaagaacatgtatttcttttgcagagacttttaaaaaaaaactttctttccaatttctcacctttatactgatcagttttaactgacagttagttacactttcaaagtacataatttaaaatatgaactatataaatgtagctcaagcattttttgcaagactagttgcaacagaaaggctaagcagttgtccatggggtcctagcatgacaaattgacttcagaaatagccttgttatgaaagagacagaaatggtcatggcagagtctccagaaattgcgcatcaagcaggaggattaattaggtactaaacgaggtttacttagtggtcctgccatgaatggccaagccttggtgaccatagatagaaggaatatagcttaaatatggattcttccaaggtcaagaagaaatcagtgggaaagatgactggatattagatcggttatcttttggctagggtatcttgtatgccccagcctagggacaaaatcagttccaagattcagaataatcctgaacctccagatggggactaagtggccatagctgtgaagattagagacggtgggggcagggagccaagaacatcattatacttcccagacaagagtgaaagttgttaatgctgaaagagaatgtgtttaaaatgtccaaggtaagcaataaagagcggtgctgacaccagtacattgattttcatttacttaaatacctttgtgtgttaacatattttatttttttgaccatgaagtagattggaaacagctgaaggacatgagaataaagcaataaatgaagctaaataggcatggaatgagagagactataaaggaagatagttagcactcggggagtgatctgaccgtagtgttctatagaatcctcatgacaacaggagagttttgacgctattaatttggggtgaaactatgactggatccctttcaaacataaaatttttcttgggtcgtttggcaataaagaacacagcacatttttctttgacatcaactaaagagcagtttcatgcatacaaatgtcgtccctcttggctttatgaaataacaactagagataaataaatactagtgacaaatgccattacacaggaaagtatgaaatttattctgatctttctttaagcctggcctaggatatgaatgttttcattctgctatggggttaagcctagttcctcaaagctctttcaaaaggaagataaatattttgctagcattaaaaagctagtgaagagtcagctgatcacactccattgttaggggaggttttgagttaaggaccaaagcacactgcaaatgagccaacaaaatttttaaaatggtaaaagagctggatacaggaacagaaataagnnnnnnnnnnnnnnnnnnnnnnnnnnnnnnnnnnnnnnnnnnnnnnnnnnnnnnnnnnnnnnnnnnnnnnnnnnnnnnnnnnnnnnnnnnnnnnnnnnnnnnnnnnnnnnnnnnnnnnnnnnnnnnnnnnnnnnnnnnnnnnnnnnnnnnnnnnnnnnnnnnnnnnnnnnnnnnnnnnnnnnnnnnnnnnnnnnnnnnnnnnnnnnnnnnnnnnnnnnnnnnnnnnnnnnnnnnnnnnnnnnnnnnnnnnnnnnnnnnnnnnnnnnnnnnnnnnnnnnnnnnnnnnnnnnnnnnnnnnnnnnnnnnnnnnnnnnnnnnnnnnnnnnnnnnnnnnnnnnnnnnnnnnnnnnnnnnnnnnnnnnnnnnnnnnnnnnnnnnnnnnnnnnnnnnnnnnnnnnnnnnnnnnnnnnnnnnnnnnnnnnnnnnnnnnnnnnnnnnnnnnnnnnnnnnnnnnnnnnnnnnnnnnnnnnnnnnnnnnnnnnnnnnnnnnnnnnnnnnnnnnnnnnnnnnnnnnnnnnnnnnnnnnnnnnnnnnnnnnnnnnnnnnnnnnnnnnnnnnnnnnnnnnnnnnnnnnnnnnnnnnnnnnnnnnnnnnnnnnnnnnnnnnnnctaggatatgaatgttttcattctgctatggggttaagcctagttcctcaaagctctttcaaaaggaagataaatattttgctagcattaaaaagctagtgaagagtcagctgatcacactccattgttaggggaggttttgagttaaggaccaaagcacactgcaaatgagccaacaaaatttttaaaatggtaaaagagctggatacaggaacagaaataagagttagaaagtgatgttgataggctgcgacactaatcacgtgatgcttaacacgtgttctgagggaaaagattgattataatctgatggaagatgaagtgccatgttctgtggcttcattatgagactctttttcctaccctattcttgtgaaaatatcaagactgcaaaaactagaaaatgatgcttccccatatgaaagccagactttgctgaaagagtgtcttcagctctgggtatttacttctgtgtaaaaatggatctgactttcaaaaggcagaattaaaattgaagcaagagaaactgtccacattgcagggtagcctctgctggatgagagctattctttattaaagactgacttcaaaacagtagaagccctgggatgaagaaaggaacatttgtgcttgttcatgggtggagttaaagggaggaaaacaggaagtacttagaagattattctctttacaactacactggaaaaaaatcaaaacttacacatcaaaatgaatctcaaatacatcctgccaaatgtaatttatacagaaaaagaatggcttctaaataagagaaaactgactcactgcaaagtaatagaaccccagctgatagcactgggaataagaacttatgatttcagcaaataattttgatagttgcttcattttagacactgctttatattcctttaattatcgtacctgataaattatcttcagtgagtccaaagtaggtcactaggaaccccatgcactgggaactagttcttagaagtaattagcctggaattttttttttcgttggtcctgtcagtcaaaagtagttcagagcccaggggttgatacttgatttaatgtattttttaaaagcaagttgatagctgggcctgatcataggaatgtctgggtatgaaattggctgagtgcctaatatttccagagtgtcagaatagatcacgaatgagagctcaggtgttagaagcaggtgcagccactgacaaacaacataaggggagaacctcgattgttatatgggggtgctttatgtgactgatttaagttcctcatgctgctctaactttgcttttgtaatgtgtgctatgtgccatgcagctatcattggcaattttacataggctcaaatgctgttaatttctcagtgtccacgccttcgcctctgaaagcaccaacagggcttaccagtcctgaaacgctatcccatgtggatataaaatactggtgacagattgcaggggtaaggaatgacagagaagcagcagccccagtatcctgagttcacaagagtgagcacatagtgctttttgttttgctgtttcactgatgttctgtaattggagcagggtgtacaatttggcattcctttcatgagcgtctctcacaaagacagtttagtctgaagtctttagcatcttgctcctttgatccgaggagactcctcgtcactaggaagaccatgcactgttggcatcactccctcctttaatgcattctggaccgtggagactcatgaatatttgaaacagggcaatggccgtggatgatccttggcactggagttcaccatacgtataagtaaattagacattcgatcccgctgacttcagtgcattctggttgtaaatttgagagggtaaattaagacaactctgagtaaacacagaaaatggcttcttttaaaactactactggccaacattgaatagaccccgctgccacaagctggatatctctgggtgaaaattttcaaatagggttgaaaacatgcttattaatcgtaattttatgataaactgagtttatccatacttcacctaagtggttcttttttatcaacttccttggtgctgtggcctcacaatggtaaatgtggttaaaccccaattagaattgctttctatcatgaatttactcatgaagacaatgggtaaaatcgaacacactcacacaaaagaatatcataggtccaggttagaaaatctactgtttgttgtattgttgtttgaatgcatcttgccatactggccataattttagctcaaaaggttcacaggtaggtaaggctatcgttaggctgagtagcacttcctagtgccgtgaaaactagccagaacgaagaaaacttcctgttaagtaccaccttgattcttttaagtcctgtgaccagaagagtgtaatagcttcagcaatagtgtttaaccaccgacttctggtagtcactcaagagcaatgttaatagcctgtattattttgggggtctttcggacacttctgaccaagaagttgggggaggtatcccatatgtgacactgggctttttactggacaatccatggcttctgtggggtgggtatcatcccaatttgtggagccttttgtaaagtaagattccatatggctttttcaaatttctttagtagtgattaacgctcatccccactctgagccaccttctcatccctccccctgcctagcccacctcatatctctcctttatgtcacctgcattctaccttccttcctccaataacctcttccttcctactccccgcctcattaacttcttcctgctctcctggattctatgcacactacatattcaacatacaaatataaagatttgatgctgtttccacacaagagtgagaacatgtgacatttgtctttctgggtctccggtcaccttatttactactcaataacatgtgctgttttcatgtcctggctataatgatgagcatgagtgagcatgagcagtagcggtgtatacacatatgaatgacatagcttggtcatacagggggtcaatttctagttcttttgagaaactgtcacaatggtttctagagtgactgtctgagattctcatggtctaggtaacactcctcttcctttgcttctcattctgaaggtaaaatgaataactgtcaactctaaaagttgcaaatgtttctattcatatagaagggggaagacatgatctttcctttagtatttcctggcctggaaagcttttaagggagtgagaaatcagtgcgtgattttaaaaagtattgctccactcccgtgactccacatggaaaatgattgtgtttattagcaaaggaagagctgcatgtaaatatttgagttttattattttttatgcatttctattcttttctatatcaagaatgataaggcctgcctctaaggttcacataattaagtaaaatttacaagtacaattattaccatattagatcagtatttcttgggcatagtcagtatggtggtgtctacaaattgttgtttaatactttgtgtcaacaaatcccctatgtatgacccacacattctactgcatatgctgcaagtagcctaactttaactgaagctaaaagatccaaaggtcacttaggaaaataacttagtaaagacagttcaaagtcacttaaaagccaattgctgccccaccctcccaaaggaaattatattttatgaagttacctaaaattttgaaattgaaccaatgtctagcacctacatatcctcattcaaaaggctttttacttaagttttggagtttcttgatattttcccaggttccatatccaattctgccagatatcacagtgcttaacaaacttaattgcaactgtggatctagagaagagtggtggattgtcaagctccacctgcacttacctgtgttcccagtatttattctggcgacgtaataccaatcatacaacttctactataacgtaaaataaagaacttataaataacaaaacaaaggaaacaaaattctaaacacagagtgtacagtcctatattaatttaaccatttccattcttcttactggtgtcaaaagactcactgtagactgatcctgatgtgatattaattttaatatcagtgaaattgtaataatgtaatattgtctagcctttggtacacactgaacaaatccctcacactttattcctttcagagtttgggggttgctgattttctcagccttgggtataaaaataggcatctcattttattcttcagtatagacagaagtttcccaaatgtgtctcctgggtgctaagacactatcctaaatatttagatttatggagtcttttaacttgcacaccactcatatgaatttcaatgcaccaataattcttacttcattttttaagaaaagggaactgtagctcacacagagaagaaaataaaacttgccaaaacccccaaacaggaggaaaaacttgattcaagccagcaagactaactgtagagatatcttgatgttcactgcttctcaaaatgtcttagtacttactgtattcagtgataaaaatgagtatatacatgactacatacacagatatataccatgagtacctccatttgtatcatgtacttagcatagtgtttcacgcttcgggataaaatgcagtaacaaattgtatgcatctctaacgataaaagccccagttaacatacccataatgactatgctacactgaagttaaaggtttataaacattatttctcctcatttttcctcaacattgtgggaatttcatcagtttgatttttggtaagtatattaaattttttatggaaagccagtgtcttcactgtgcctgtttgtgtgtgtttaaatggggtaactagcgtgaaagtttaaagagacatttttgccatagccttccttttgaacatacttttagtcagttggtttgtgtttcagtgccagacactggagtaccatactcaggaatgtttcccaaggctaggcaaaaagtggggtgaggagaaattcagagacaaaattaaactttgtttttcgctgcccgggagaaagatcatggactatctacaccttcccaagatatattatcctatattataccatattatataccaaattataggtgtctatttttcccatggtaaaatatttatgatgataaataagaaaaaaagaagaaaaataaagaagccaacgtatttaatagaaaataaatatagacaaatcatggctttggtcaccacatgcatgtctctcaatttagacttaagctgtgacataaagtctcacaatttcctatttaacataccattttgatagtaatattacagatttagcaatgattttggacaaatataaatgtaagcaccatagtaatgggacatctttgtcaaggtagctactaaaatttcaagctatattttctttccatggatctatatgctttgtaaaaggaaaaaaatctaaacacattaggtacattaacccagggaccgcttttcaaaatttttatttagtcatgaaactgaggatactttttagagggtggcagtgatttttttttttaggaaagctgaacacatgatagcattttaattggagctgaattattttcaataacccagttctgatttttctcttaaaattttcaactctcaagacaaaattgattcaaagattttggcctaggagccaaaatattgtcaatgtagacaaatttgttgtacttctacaagaaaagagagtttgtgtgcagaaacttttctactgtctgtgttcagagagtctataagtagtagttttctgaggagttggcattgtttcctgagaagccgtctgcccaatggtgtattaaagtgtgtaaaaactatccctagtcttcagtggttgattccaaatagtgatgtatatgttggctcatttaagcaacaaatcagtgagctatcttcagcacctcatgtccacttattacagatatttttcccatgagtatctactaacttgctgaacaaattacaaaattgcatgcaacgctcaacagaaaaaccaatactggggatggctcagtcagtaaagtgtgtcttgtgcaaagacctgagttcagattctcacatccatgtaaaagcctagcaacaggagactactgtgagaaagttaacgttggagagtctccagagttcacttgccctccagtctaactgatgagcgctaagttcagaaagggaccatgtctcagaaaataagatggagaacaattgaagaggacatactcttcaattcactaagctatgaaagagaggaagaaataagaatgatgcacttgggacaaatgatcttctgtggattatttaccatagtgctcttctttttcactacagttcttttagtgcctttaacagtacataccattctctacgttcatctctccaacgaaagttgttttgaaggtaataataaaggaatattagggtagaactagccataaaggcttacttattgtcactaaatactgaaggaagtacacctgagaagagtatacaatactagataaaggtaaagtgaaaaacatagctttacactaaaaaatatcgacatatttccattaaaactatagacctctgcataaatgtataattataggacagtcaaatacaacattcaggtatctcttagaatacaaaaataaaaatagtatatttaccagcactatgccattgagttctgactgactgatttactcacaccagaaagtaggctgatttgggggggaaagaacgtacaagagaactatttgccttgcatcaatttgggtgttcaaatttggggattaaaaagaaatgcaggaagaggaaaagccctgaactaattaacatatcagcataatagtcataattcttcagagaaatacaatcactacaaagattgatggatcaataaatgataccgtagactaatgaattgccatataggtagataagcaagtagataaaggggttaattataaatatatatatatatatatatatatatatatatatatatatataattattccaagaccaagcagttgaaaaccctgagaccatggagaaagtatggtattactctgtttttaaaaacataatgagaaaataatcatgagagctacatccttatttctgtgagtttcgttcagttataaccatttccttccgctaggctttctttaacttaaggaagtatctagctaggtaagcattctttgtccataaggtaaccaaacctttcctagaggatattaatcattggcccttttgcctagacggaggttgtgctatttcattgactttaattttagagtgtggaagttaccaagagatcactgaaggctctcctgttcctccagtttatagtagtaaaccactttacccctgagtgccaggcagcattgcctcagaggcatgagaccaatgagaccaggcaatgataataacttaccattccatcagtcagcattgtgccttttgtacattctttcttttgtaagtgacatctctgggtcatcagagcacaagaaaaggctttggccctgccatcatggaaccaattatgcacacatatttagatttccaaagcatttctcactgtaagctctgtatcacagtagcatccaccagagaacatgctaggaggcaagtggtctactacataattttttaatcaatatgtgtactataccaaaagtgaggagtcttaaagggcaaatgtactctagtgttgccatctctgcaatctttgaaactccatggttaaaatggcctttctaacctactgtgaaacattttttgacctgtttcaaccaagtacacagtgaggtaggtcactttctagctgtctgtgctacaacctacatgaagtgtaactttatgcttagtgtggccaactaataatttcaacctaatccaacagtttatcccttctttccaccattatcctgttctttcataccccccttccattcccaagcatcttctctagatttttatctaagctaaaagctcagagttttttcagagtgtagcatagctcctcacagatcatattgtatagctcacttttaggagctcaaagaccctaagtacaaatatttgactaggggtgtattagttacttttctggtagctatgtaaatagtacccaacaaaaacagctaagcaaaggtaaggtgtattgggctcagatgacaatgccctgagaacagttctaaccttgtggtagaagtgtgtaacaaatgctcacacggcatcaccataaaggaaatgtgatgaaagttgatgttcacatcattttctcctttggtaaatgcctttttaaattttttgagattataatatatttacatcatttcctaacctgagactacaacccaaatgatggtgccaagctctctggaaacagcctctgaaagacacggtgttactatctttggctactttgtggttctcctttcttccacccttctacatcctgtttcttccacactttcaacccccctcacactagataagagagaaatggggataagaggaaagggaacaatgttatcattagactaagtccagctagtgagaagcatcaagttccttggggcatctttgatcttcaccatcagcctaactataattttttttcttccttctcctcttcctccttcttctccttcttcttcttagtgaatgaatacttgacacaccatgacaaataagaaacaacaacagctaacagcaaacaagtaataaccaaaaatacaccctgcctcttgggaccctagcatttatatatcctctgaagagtacccagaattccaaatgtcacccaattgcagaaacaatctgcacctggcaaaatcacaccaccactagagcatgaagcaaaccatactgagctactgtgagcaatctgaagcagccccatatcccatacctgggattaaaatgaaaccatactcataatatttacatgctttttaagactttatcttatgtgtatgagtacactatagttgtcttcacacacaccagaagaggacatcagacccaactacaaatggttgtgagccaccatgtgcttgctgggaattgaactcaggacctctggaagagctcttaactgctgaaccatctctccagcccacacatttttttaaggaaaccaaaaccccaaaattgtcactaaaattcaactactgacaaaatttattctcttcttcatttcctcctaaattttcctcctccagcattagactccacatgcatctttcacacatgttgcccgtctcttgtagcacattacagcaaaagggtgattcttccctcattgaatttccccaccccacatgctcttcttcttgaaaattcaacctgatatgccgagctttatttgcatactttccttttatgtcagtgttttatgtctatacttagactaccgataacaataggtaaactgcaggaaatcagtaatggtctacgtaatttctatgggttctttgaatcctaccactaccacaacaaacttggatttttagtgcactgtaagcatttcctccaaggcaacaagttcattgttcctctttcctatggggtctaaaatttccaacaattccttcctaaattatagaagaggggatattgttttcgagaacacagcacatcctgctctgttttttaaccatacattagtagaaataaaatgttgattaggtagtcgtccctttagaaagcataggaaacaggaggctcttgacagcatttaaagtgggcactttagaaaggtaaacatataatgaagctctttaaatgagaggacatttttgagatgaataacaaaacaatgctgcagggaaggagcaaggtgaaaggcaagaaagaaagtaattataagaaaaatctatggccagagaagctattacaattagtcataaaatttatctgagtgccctgcattaaagttaaagaagaaaagaaacaattctcccactataattagaaaagatgaagaaatttgtcaagacactttatccagtccagagctccacaacaatttctattgtgtgcacttactagaattttgactgaaatgaaaaaaacacaatcaatgattgagtatcaaaagcttataaacactggaaattcgtgtattagctatagccctgtaaggttatgaagtgtcactctgtggaggttattcctgaaagatctggatgtgacccttgctatatttacataactcagttcaggattaaaacaagtggaataggtagacagtgtacatcttcattagccttaatggtgttctcagaaattagaaatcagacatatctgcgtctttatagttgtgagacctatgaatacaaaacactttctagaagataaactgtgaggcaaactagacaagaagctcaggtcctgagatgttcttagagtagtaggcccaaatattctgtgctctattccaaaccatttgtggaaagctcaggagttacatgactttatctatgacaataaataccatttatttatatagttttggttacaaatattttattttattaatgactaagaaaaatgatataacaatttaagtttcaggagaggtgaaaactttggtctaaccttcaccacaaagactcagaaggatttcacaaatgtagacaaaaaaaaaagtcaattgttgagaaaaccagaaatgaatatatgacattctttttcaaattgaatctttccaaaagaagatgaattgggtattatattcatccatttatgaaaaaagtgaattcatagtttagaaaggcacatctgtgcaactatatgttttttcacaagatcaaatatgagttcaacctcagctttttatgaataaaaagctcatgtcctttaaatttcataatgctatcatgtagatatgaaggtagaatttggattgtaggactgtcttttcagaaaacagagtagtttatggtgcttgaaaagttaggaaagtacatgtagtcaaatgacagaaacagttttccaatgactctatcctttatagagtttgtatcctaagagagaaatgtacaataaagacaggagcaagccatatgctctcagataataggtgtattcaaaagcaacaactgttctgaagagctggattgtgttagagaatgtgctatatactatttatagaacacttttgtgaggacttatcattaatcaattcaggtaagtattgtgaaatgctttaatgggtaagcactacattctaagagctataaccacacacacatgcacatgtacatgtgcacacatgcatgcacacagttttgttcataattcagggcaaatatgcctacttagcatgagcttgctttttcttgatcactggagtctcattcattcatttaatagagagaagatgaaaaagaatggccctagatggaattttataaggttgtctttgaagtggcactccaaatttttgctcatattccgctggctataatattcattatatagtaaaagtgtcattaagaagaaagaactcagtaatgaggtttagcaatgctgcctgaaagaagtattagatttctgtcctgtgaggaggcattacatagcccatatgatgagccaggtgttatacacagcataggcaacacactttcctttaaagaactttcattctaagatagaaaggtccaagaagtggacaataaagaaatggacaaacaacatgctcattggtaataggcattatcaaaagcaatggctgctctggagttaaactgtggtagagaaggtgctagctagcatttatcggctgcttctgtaagggctgtcatttagaaggtagaaggtgttataattacttgtcctactactgtgataaaataccccacaaaaacaacttaacagagaaagttatttttgttttgtttgggtttgattttagttcacaacacaaggataaagtccatcgttgtggagaattcctggtggcagttttgaggcagatgaccacagtctgtgaagcaggaaatgtcacatgccaacattcagctagcttttcctttttatgcagtactggaccaaagcctggggaatagtgctgcccacagtgaggatgggacctcatatatcaattaaccaaagcaacacaatccctgacaggcatgcctgtaggataaatacatagatagatgtacctggaggcctgtctcccaatttatttcagaccctgtcacgtaggcaattaacactaatcatgacaaacggaatgtgagagtcagctatgagaagatctgtaaaaaacatttttctgcccaagacaactcctagtccaaaggcacaagagtgagcataagattgataccaggagaatcaagaaactgaccaaagctcagtgtgtcctctacccagatatggtggaagagggtctaagattgaaggtaaggggtgactcatgaagcatatagttcatcttcataaagaagttcaatgtatggatagtgaaaaaccccagattctttctttttgaatgatatgattagacaattcctactcccacttttttctggcatcttccaatgcatccctaaataccattaacaaccccttttctcaaataccaggcaatgctttctcttgagtcagtcacaccaacatttattcctctcactgtggatatgggaccccttagctggagcacaatgtcctgaagagtagagacatctaatttgtcacttccttggtaacaagtgcagttccaagaaaacacttagctcctggctgggcacataataagtaagtgttaataaataattggatgataaaaaaacaatcaaaggaatagagagcagcatgactttgtatctacctctcgtccaggccttcacgtttctgccatcagatccacacagcatatgggattcatggggaagagtgtagaatctacaccactgtgagaagcaagagattagagagtcaatcaaagagatacaaaaatgcccttgctgagcactgggaagtataatgggacaactgtcaaatcatcagggatgaggtgggagagtcaatttggaatggaagagggagctggtgagagaaacgtttgttctgagtcaactgatgaaaagcagaagcaagtggaatgcccagtaggcaaataattaaaggttaagttgtgtgatacagacagaaaggtctgcaggagttcaggaaaatctaataaagaaaatagatttgaggagagaagtaggaatagacactgaggtagcaagaaagaaagaaagaaaatagacttctgggtaaaatctactaaaaataatgggataatacaaagaatggacacatgaattatacattataatacttgaatatgccgggcgtggtggcacactcctttaatcccagcactcaggaggcagaggcaggcggatttctgagttcaaggccagcctggtctacaaagtgagttccaggacagtcaggactatacagagaaacactgtctcaaaaacaaacaaacaaacaaacaaacaaaaaatacttgaatatattaagatgaaaatactagaaatgagccaatgagcaaaagcagtgggtgctgccagcttccatttacttgagctttgctgttgaacttctctggatcctcacaggcagacaagagacccaattctatggcctattccccttgtggatgggatccctcagctagtctaggtcaagactgtgatgtgtgactatctgattgtaaatgctggactcctcggactcttattttcctcatcctgaaacagtcaccactagtgctgcagtaggtggcttctccatcaccccggaacaagagctaggtcgtggctatcttaagacactgtggtgctagaattgcttattgactgacagctgtcatcaccggagaggaaggaaggacaggtgtgaggtttgtttcacacctgcaatagaagaaaatggaaaatgtgaagatctttagagatggagaacacgtgaagttagcaaatgatgatgatcatctcacaacactcttattcaagcaggcttttcagtggaatggagcctggaagcttcactgcaggggtgctggcctgcagatctacaggtcatctggtacaaagctgggcaagctccttccttctagaaggctggtgggttcctcagatggaccagctgcctttctcttccttccccctccacacagtttacacaaactggtttgattgccgggggataagaattggatggagactggcctttccagatctctagtgacataatgccggagacaggacactaaaaataaacaaatgatcccagcccaaagcaaaagtaggacaacaatttaccaacatgagagaacaaatgcttgatagagttctgacaagaaggatgtatttaggaagataaaacctggcttacaagaatgaagcagaaattgattttccatatggggcctaccaatgtggagattagcacaaagaaaaagaggactaaaaaggcgacgagtccacttcttgttccaacaatctgcccatgtccatggctccctccctgtcgggaattatgagaaggaaaaaatgagaaacacaaaaagaaagggtctatttttgagctctctttacacatgtagaaacctaattttaaaattcttgtgtttgggggcaggtgtgcttccacacatctctaatcctaggactagaagggaaaaggcaggaaaatctgtgagttcaaggccaaccagggctccctcaggagactttatcataaaaaaaataaataaaaggctttttcatgtgtgttacttaaagttgtatttgagataattatttcagtaattgaaattttgtttctttgtccatttttaaaatattttataaagcttttgggaatttcctacagtatgctttgaccatattgctgaaggtaccatatatattagtcatagagaatggaaaattcaaattggttctgcccaggaagcttgctccctgctagctagatttcatggtatgggaagattctatgcagacctctgtgggcagaaaggaagaaagacagtagtcttatccagctggaaaccctgggaactaccgtaatgaccaacacgggaaagatcacccatgggtacaatagtggcagaaatgttacatgatggcaactgcttactgatatatgtacatcttgccaagagtccaccgttaagggactcacagtgaaactatactacttggctaaatggacatcatatcaaaactgccctctaaattcatatggtaatgtttaaatataaaatgtactcaccaatgctttgacctgaaagtattaattgtgcggttttttttcttcttctttattattgaaagaagaggcccaatgcagtaaaagtaaattttcttagcaaccttctgtcagaagaagagaaatcttcacacctcagacaaaggcactcccagggtgtatactcgagttttgatggagctgcatataaatcacaggaacacaatgatcactctgagtcagagtttaaatctgccacttctgtctttctttatccactaaccatgaatccagagctcctgttggctgtatttcatagagacagagatgcttgaatcgccaaatggatgaagcaaaggtcacacaagtggttgcatggttagatccatccaacaaagtatcctggtgtcctgagagcacagactttgcgtcagctctcaacaaaggctcctgtgtttttaacagctgcttaattaagcacttagctacagattgtcatgccttatatttggtgctgctgtttgctcctgtgtacttgggaataaattcttcaccattgttgcatctcaaagtttttcatctataggaagagaattgggagacctgttttctaaggttattagaatcatgtgtatgtgtgtgtatgtatacatatacatatttatgtatatatatatatgtgtgtgtgcatatatatatgtatgtatatatacatatatatgtatatatacatacatataatgtacaccattaccattaacctgatttcttagaatttttttctctttaaatttgtattgtgaattctcagaatactgactttgtgctgcagtcttttcctttcttttcctgtggtgcatataagggaaggaggagtgtcacacatgccaggcaagcacacgtgctgctgctcagttttcggtcaacttgacacatcaacctacctgagaacttaaaatgtagaattacctccatcagattggccagtgggcatgtctacagggaattaattattgatgtgggaggatctagcctactttgcacagtgccacctctgggcaggtacatggtcctggaatatataaaaaaaaagcaagctaagcatgcttccagttataggccaggaagcaaatcccccctcccccacccccatggcctgtgcttagtccctgtctccaggatcctgtcttgagctccgggcctggattctcttgaagatgaactgcaaccccttcctccccaagttgaacagaaacggaacaagaatagcatcctactgctgctggcatctctgaggataagttcattattcagactatgatttggattagtgtttttttttcattcctcacactgcacgatagagtcatcgctcatcacagaaatgcttcatacatctccaatacaaccatttaaataggtcttgaatcatagcacttgagaaaaatgaaaacattccaaccaattgattggaattgttaaactgatgactacaattttgaggatttttttaatatatatatatcaagtgatgatggcagtattgtatagactgttcaaaacaagaaaaatcacaaccttctgaagtcttagaataattattgttgttgttagagaaaagggcctttaagataaataactttcatattacagataggatttatttactactaaagtggaccacacaagaatccagctctctcattgagcaaggtagggtttcgagaacccctagctatctcagaccatggatcctcttgcatggctgatgagttgggggacagaaacctttagaaaacatttggatccagaaaccagactcctcaccatctccctaagttgcttctcaaaacatgataatgtcttatgcctggctgcgtgggactttagagatcttacactgactttcaccagtctgcattactattcataaatgtgaagcagaggacagttaaatagtctgctcaaggttctacacttccatatttctctcaacatcatagctcactcttgttgagattcacatctagggtttatacagaataatgaggaagtcctgacattttttaattgaaggcctgataaaagaatcaatttgatcttgaatttttatctcatgtctaggagtgaaagaaaaaaaaatggcataagccgaaagagtccttatctttactgttcttgtcttaccgtgaaagaagaaaaccatcccttaggctgaaactgttttaaatagaccatggtcatttactttgtaaaaagcatctttgaagctttaagggaagaaagatggcctggctgacctaactcattgaactttaacttacatccgatctatgacttcaagaggagtactgcctcccccgactagtgtcatatatcctgtaaaaaccactgaggttccaggtagggctgacaatgccctgtcgtttccacagagcagataaatttatttttaaccgtcaaagttctcattgcttgattttcccagtctaaagtgcatatattatcagaatgacccaatttcaaagccaagaattgtttttcttgaaacaattattagcatttttttttactttttataaagtcaaaaaccaagaacatatctgaatcacttttcttgaaagtgtgtaccatgtctgagcacaatttttaattgcatctattagacagaggctccctccctaaaactgcaaagagctgaacttacattttcactaattttgtgttcttgatttcctagcatctctgaatttaagttccaatggctgtaaaaaaaaaatggagagagagcaggacctacccatagaactgttaggagctggattccataccacacataaaatatgcagggcagtctttggtgctcagtacatttctgatgttatgtttgtaaatttggtatttcattatgatacatctgtctatccccaaaacttgagtttttcacctgtactcatatgacagacagatgatctcacagcctgattctccctgagcaataatccattctcttaacacttatccaccgagaatctaagaggtggccattacctcaggcagtggagttacagaagtgaatgaaactgatttaaatgttatagaactaagtttactttatattagaaaatacaataaataaatagatgtatgtagttcaatagagataatcgcttaagtaaaatttaatgtggaaatggcatacttgagcttaacatagaagatttttaaagaagtaggtcatagacaattttaggaaggatgacacaagaaaaatgttctaagaagacaaaatttttaataaagctgcagaagaccatgagggagacagaccacttgctatgcttcacttccttccaaaagtaactgaacagaatccagcattcggctaaaagcaggagcactggggacaaaagtggcttttgaattaatatcagataataactgcccaatccaattctctagtgaataaacaattgtaagtgtatgcaagtgtttaagagaaaggtatttttctttcaatgttgtgtttctcatccatttgtcatccagactctttccttttcaggccctagatcagttgatcttaacgtgtagtccagggaccaagatactatttgactttttcattctcacacaaatgcacagtagttctccaaaggctacttgatatgttttattcagcagattcaatgcaaaagacggtattagtgtccagttttcttcttttaaggcaaacattaaagggattattttaaagaatgtacatattgccattcttttcaccaaagttatttttagaaaatgtttccatttttgctaaaatacggtatatatcaacacatagtgaaatattactgtatccaaatgaaattaaatattgaaaaattccaatgcctgttttagttttacatttggtaaatattgaaacatgtaacctacttaactagaagctccttgtggtcttcactgtatttaggatcctaaagggatcttgtaaacaaacagttggaggagtgcagtgcaggctgatccttcctcagtgtctcttacattaggaacacttcctacatggttacaataaagccctccgtttagtgactcttcctcaattcaatgaatacaactctgccaggtttccattgctgcataacaatcatccaacaactaagcagtttaaaaggcagaaggttgataagtgtgaataccaagaaataaaataaaaaccccaggagtttttaacactagtttgcctagttttcttcagtggtctctctctctctctctctctctctctctctctctctctctctctctctctctctctctcctctttctctgtctctgtgtgtgtgtgcacgtgcgtgcacgtgtcccctccctcctccttccccttctctttctcttcattctctccctgctcttctcaagggctagggtaaggcaagaaggaaatcctctatgccccacattcctgacctagaaaaactctgaagaaacaaactacctttatactatgatgtgcaaaatctgcctaatctttcctcttttgtctttacaataatttgcataacaagtagttggtcaattcagagaagtagtaatacatgcaaaccataaggtccgtctgtcatttgcatttcttaggacatggctttatgtgtttctaagtatcctctggtttgaacagaataggcctcttgaagctgacagcattcctatgtaattgactgtagaataatccacttacctcatatttgttttgagtatcaacaaactcctatgactgtgagagctgctggaactctctgtgcttgaaaagtctggcaagtacctctggatatatctgcacagtcatactcgcaatccaccttttcacttgaagttacttacaaaacttgaagatagtaattaagaattccaaatggatggtaaaatagacagctcatgcatgcacaggtcccatgtctctgggaagcttgtcctgtccatcaattttactgtagtaaaagtgttcctaggactagctccacactaaaggtgatggaactatagaagagaaacaataccaagaagcaaaggtaattgataccaccacttatttacatctggaacttactccttttcccttgtaataaatgataggtaggtaggtaggtaggccggcaggtaggtagttaggaaggagatagataggtaggtaggtagttagttagatagatagatagatagatagatagatagatagataggtgtattttttttttctgttccagatttttgtttgttggtttctgtgatgaaacactttgtccaaaacaacttggggaggaaagggttaattccatctcacatctctaagtgacagaccaccattaaaaattcaggacagggattcaagggaggaacctgaaggcaggagtaatggaggcttgttccagtgactgttcagctgccttatatagcgctgatgttggtgctgacaatgaatggactggaccctcctacatcaactagcaatcaagaaaatattccacagatatagccacaggccaatctattgtttgagttatggttcctttccagacttagttgacagtcaagattagccatcacaattcacattattttgtagactaaatctccaaaaggattatagttccctgatatataacctgacattcccttgctgcatatagtatgctactaataatttgcactaagtgtacacttctctataataaataaattaattattcaatggaactttgattttaattttagttttgtaaaaataaaacttatgtggtgtggcctttatattttcatcaaatgttgcaaaattaagacagactgactttatctttccagagccagtcctctccattagccagactcactaatttcccccaatttttatgttctgtgtggtcatgtactgccctccctataaacaccagttccttctgaattcttcaaataccttacttgggttattgtcatgagtgaactatcgtatgtgagaagattagtgagatgggacagctgaggcatgtctggagaaagcactccactggcgtttatgtttggggtgggttcggaggagggttctgtttttctatggcaaggttggaggactatgcccgtttaatgggttgtgcatgtggtcatgcattgtgtgcacaaatagtgctgcacagtagtcacatttagatttcagaaaaagaaataaaaacatgagcaggagtctttgtagatctaagtgttttttgcattggtctctctacaatacataagctttcacttccagatctgtttcaggggtcctttataaatgacagaaattgaatctttgtttccaaggagcagaatacaaaatgcatcagtgtgccatttaagggaaactattttgtcagccttgtttatgcactcaatataatagtgttttaaagaaggctagacccagtctctgcctgtttatgcaatataaacagaagcatcccttttaacgtcctaaaagcaggatgtgtgctaatttcaccaagtaaaagccactgcacctgcccatgtaaatccttgtctgaagcaacctcgctgcctcacaatagtgtgaaagtacacataaaagataatacggcaatgctcatcaaatattaatgtgcattgacacatagtcatctattaccgcagtacagtccccacactgagctgctctaggttgcaccctccttcacctttgtctttacccctgggtttgcctcctcctcccaggcaaagcaaagctttgttcctccccctccacttcctgaccaagtccagcagcagacccactggtgtcctcatggtggcctatttagttccagtaaaatatctattgggctaatgtgcgatcaagagaggactggcatttattgtttggagttcatgatactgtgagctgagcaacactgagagccagccaagggctctgagtaacagggagctggaagttcacgagccatgtttgtatttatttctttaccaattgcttaccagcatttcagcaataaagccattatgtttccccatgctttatgtaagaatgtctgactagccaaatgacagttcaactgcagtttaaaaataaatgtgttggttaaatagttcagctgggaatgtatttttctctttgtgctcagatacaaaagcagttgttcagtgactgagccatgcatgcagacattgtacctccctgtggcttgtctctaccatgcaagccaggactcatcccatgtccggcccaatttcagagtaatggccacacctacaggaaggaaggaaggaaggaagaaagcacaaagaatctgtttacacaattccaagtcatccaaatcaaaaaggtatgccaaaattcagtgtcttgcttccagatagaatctttcattgctgtggcacaaatctcttctcatcaggaggggaacaaaaagcaagacctgaattttgtaactgtgatgacatgctgaggcttttcttattgttacatagggggtgaaaagttcctacccttcatagctcttgccaaatgaaagtttccctaactccttggatttaaattggactgttttccatgtctttctgttgagcatgtttaaaagcaactgtgttattttttttaatttttttattaggtattttcctcgtttacattttcaatnnnnnnnnnnnnnnnnnnnnnnnnnnnnnnnnnnnnnnnnnnnnnnnnnnnnnnnnnnnnnnnnnnnnnnnnnnnnnnnnnnntacccaccccccaactccctacccacccactccccctttttggccctggcattcccctgtactggggcatctaaagttggcaagtccaatgggcctctctttgcagtgatggccgactaggccatcttttgatgcatatgcagctagagacaagagctctggggtactggttagttcatattgttgttccacctatagggttgcagttccctttagctccttgggtaatatctctagctcctgcattttaaaaaacagaaaaagaagaaaaaaaaaagcttttctctgtgctgaacttttgcctcagataagtccttacccagcacagacttagccaggaacttcacactcggttgtaggcgcatccctcatctcctgatcaataattcaaatgctcaatagaaatgccttaaattgaaattgaacataccattaagagtcctcgaaaggtgggtatcattcattcaaaacagccatcggcactccacagtcaccaaagcacccaatatagctagaaatctggatttctcgctgacagccaaggcatttcctctatatcaattatttagtcttgagtgagtaaacttctgatcgccttcctttgtctgggtatccatctgtttctctgagacaagagtagcacactcattcatttctgcgttgtccaggcctctgcttttcattaatctttttccagccatccagccatctctgagccctgtggttataagaaattatccatgcaatgaacttaattttaaaaattctgcttcataaagaggtgacagaattctcagagcccagtctccttccactggtggccactgatggagaaagagatgctgattggaaaatggtgttgcagaaatcactggaaaagagataaggaaagcatagaatagtcccaaaattaagtgattaaacaggtaaaactctttcatccatcttccttatcctacaaaacacaggcatgaaacctcaactacctatgctcaagttacagtggacatcttaaatttaatgaatttaatatttgatctacaaacctagaatcagtcaattttgctttaaaatcacgatgagtaaataaatacatgaagttaagttctaattctaattttgaattttattttacagtaactgtttggaaatttccgtctgtaatgttctctgccacagctcttcagtgcatgatgtggacagaatatttttttttcctgtttaatttggtaaatttcacaacttcattctgaggttgtttgtctaaaagcaaaagcccaccatgtacaagacaaaataatggaaacaaagtactgaagggcagtcctgagtgcttcaaagactacagtcgcctgctatttaagctgaagtaatgtgctggcttaatactgcatctgttgacttaatgcagcttgtagtaaaaatgaagagcagaaagtatccataaaatataatccacttcagtatttatgataaatcaattatggaaaaccctatgtatgggaaatgcattctaaatcatttcatgaataaagaaatacagcaattttgtgctttaaaaataataaatctgtacaccagagatttgtaactgtcacaaagtctatccaagtggatcatggtttcaacccaatcctcctcccacacagcattctttgttctttcacgggatttcaaaggaaagactttattgagtgttaatctttttcaatgtgcctttattcactttggatatcatgtgattatgcttaatcagtaggagtcattcagtcttcttctagatcctacaaacacagcatatcccaaacttagatactctaatgctaatagagtagaatcacgaaaaaaaatataaagtacttagaagaaacacctcacaggtaaacataattactagctaccagatctaacagaattattctaataacaagaaatttatatgagtagatgacagataaatgacacagagatagatagatagtagatagcaaatagatagatagataatagataatagatatagataatagatatataaatagatatagatagatgatagatatgatagatatagatatgactgtaatgatcatacatacatacatacatacgtatgtacaaacttttaaaaaataccaaaagttgaggatattttactggccaatgaaactaggttttaaaatgcagtcaaaaccccctaatttttgacagaaacaatgactgatcatccctagattcaccaaattttgaaaaacataaagacaaccctagtcagaaaattgtacataccttgttgagagatcaaatctgctttaaaaatagttggaatgctcaaaatgcaaacagacacatttctaaaactactactaggcaagaagtgggaaatatctgttgttgacatagttccaacaagaaaggaaaaaggctatgaacagagagacagaaaacatacagccctggattgggatattttcgcagcagtggacttttgcatagtcagatgggaatgctggtcatgtgagatcaaaccttcagccctagatattagaggaagaatttgtcattttatctatctctactttagacatgaaaatggaatatgtacaatatgcaagtaaagaggaagccacataaatcaaaatatacatcctgatttaggttaggtgaaactcgctcaaaagtgagtaaacaaacacgccaaactgaacacttcctggcatcttttctattgcccaaacttaataacatgtgtagagccaatagactgcttcatgtgactcactagatgacatatctcatagtatttctttaatatgatattattttaagtatttggtatagccctgaaaatagtagatatcagtaaataatattattactgataactaattagcattaatggggtaatttgaaaactatgaccctatataatgaaaagaaaagactcccattcaaaatcagtaagtaaacatgtctggtccaagacaaatctcaggaaacattttgttatcgtagagaaagaggatgaaaaaacactgacaaacatctcagtacagaaacatcaactactctcagaagggccgcatcctaacagaaccactgatgtgaatgtttccaaaatggaagtctcttaataacaaatctggggactggtgaaacaggatgctgcctctatacctgctgttcattctggagtagttacagggcatcaaataagtagtctggaatcaggcaagtaagacagcgaggataaactggaactctctcaaggataaactgaccatgcaaggatggaatggagcaccatatgtctctcattatctcctgcctcagtgagcaacatgacctgtataaaaaagcagctcctatttcaatgggacagcatacccacctggatactggctcagggtctctgatggaggaaatctcctgggaacttgagatgcctgaaccaagcttcttccctgtggccatggagaggcactagcagtcacaatagccatgtgacctggggctcctgcgcaaccctccataaacttgctgctggctgttgcttgacttccagacagttcttgagtccatctccagcccaggtccagatccataaaggtggggcctgtagaacaatcataattgggcctgggtatctacaaaagaacaaaatgaaaatgtccaggattctcttctcttctaatacctacatgatgatgagaataaagtactcatggcattttttttttcaaaaactgaatctttcctatgaaggaattattaagttttcatatgaaggacttcgttcctgtttgggtatttatgtagtttctgaaggccccagacctcttcacctcactaagattctgattctttaggctggtatacgtccactagctgcatgttctctataaatccctctccacaggtcgaaaggtacacctgtgctggcacatcagcgtgcagaggatgtcccctatggccacacatcatactttaacaaacttcatcaactttatctttgtatcttcttccatttcgggtctagtcatactcatcaacagtggtctcccctatgccacagttctttccatctggggcataggaataccccagtcttggtacctaaagggattgtctacaagtctttcaagccatttttgttaacaaaatcccaactcttttgtctaactggctcttaggtcacagcttgtgcttgctgtgttttttatctggtttctaaacatttttctctcaacaacagttaacatactcatcccccaaggtataggcactttatgcaggtagatagatagatagatagatagatagatagatagatagatagacagatagatagacagacagacacgtgtatatatatgagtatgtatgtgagtgtatgtgtgtgtctgagtttatatatacatatatgtgtatatatgtgaataagtaataagtatagagtatatgtatgtacgtctttggcttttgtttgccaggtacccaacttattaacttcatctattagttaaataattatttttaaaaaaaatagttcagtcccttttttatgaagatgcatgtcacacacagtcaagatatatcttgtttctggagctaaaaccatccagtggaagaaagacagcattttcaacaattggtgctggcacaactggttgttatcatgtagaagaatgcgaatcgatccatacttatctccttgtactaaggtcaaatctaagtggatcaaggaacttcacataaaaccagagacactgaaacttatagaggagaaagtggggaaaagccttgaagatatgggcacaggggaaaaattcctgaacagaacagcaatggcttgtgctgtaagatcgagaatcgacaaatgggacctaatgaaactccaaagtttctgcaaggcaaaagacaccatcaataagaacaaaaagaccaccaacagattgggaaaggatctttacctatcctaaatcagataggggactaatatccaacatatataaagaactcaagaaggtggacttcagaaaatcaaataaccccattaaaaaatggggctcagaactgaacaaagaattctcacctgaggaataccgaatggcagagaagcacttgaaaaaatgttcaacatccttaatcatcagggaaatgcaaatcaaaacaaccctgagattccacctcacaccagtcagaatggctaagatcaaaaattcaggtgacagcagatgctggcgaggatgtggagaaagaggaacactcccccattgttggtgggagtgcaggcttgtacaaccactctggaaatcagtctggcggttcctcagaaaactggacatagtactaccggaggatccagcaatacctctcctgggcatatatccagaagatgccccaacaggtaagaaggacacatgctccactatgttcatagcagccttatttataatagccagaagctggaaagaacctagatgcccctcaacagaggaatggatacagaaaatgtggtacatctacacaatggagtactactcagctattaaaaagaatgaatttatgaaattcctagccaaatggatggacctggagggcatcatcctgagtgaggtaacacattcacaaagaaactcacacaatatgtattcactgataagtggatattagccccaaacctaggatacccaagatataagatataatttgctaaacacatgaaactcaaggagaatgaagactgaagtgtggacactatgcccctccttagatttgggaacaaaacacccatggaaggagttacagagacggagtttggagctgagatgaaaggatggaccatgtagagactgccatagccagggatccaccccataatcagcatccaaacgctgacaccattgcatacactagcaagattttattgaaaggacgcagatgtagctgtctcttgtgagactatgccggggcccagcaaacacagaagtggatgctcacagtcagctaatggatggatcatagggctcccaatggaggagctagagaaagtagccaaggagctaaagggatctgcaaccctataggtggaacaacattatgagctaaccagtaccccggagctcttgactctagctgcatatatatcaaaagatggcctagtcggccatcactggaaagagaggcccattggacttgcaaactttatatgccccagtacaggggaataccagggccaaaaagggtgagtgggtgggcaggggagtgggggtgggtggatatgggggacttttggtatagcattggaaatgtaaatgagttaaatacctaataaaaaatggaaaaaaaaaaaaaaaagatatatcttgtttctaaaataattaaagaaaatggtgtataaatcatttcatatgggtactacttggttttattttgtttctttgttttgttttggtttggtttttggtttttggttttttgagacagggtttctctatatagctctggctgtcctggaactcacttttgtagaccatgctagcctcgaactcagaaatccgcttgcctctgcctcctgagtgctgggattaaaggcgtgtgccaccacaccggcttatatgggtactacttgtactgcagtcacttatttgtgtcacctttcttttgagtgtcgtaggtcactgtgtataagtggttgtctccaaggtccagtctgggaagcaaaatacaaattctgtatgtattttttctacatagtaagttattttaaaaaaaaattaccaagacattcatagccctccagacaaactgcctcagctggtcttccagaaacatcacacccctgtgctgctattttgcaggcattaaggggctccaggggaagaagaaggcctcttcctccataaacagcccctgtgggtaaaacctcagacactttcatgtaatcctctgcagcacactgggaaatgcagctggggaaacagacttaccgcttattgctgatcatctcaggaagcatgggtgtgagagaccctcctaagagctctgaaatctgtttcagaatgtcacgtggtttcctgttttcacctctggcttttcctggatgctctcatttttcttaatctttcaaattcttttgtttcctttattaatctctgctcctctttaaaggagggccgagttctggaagcttctgtaagtcttgcctttctttgataccaggcttcagcctatttttttctgtgagccctggggtcaggactccctagatatggcttgcagacagagagcagttgtgccatcccaagaatagcattcctgtgagcacattaaaagcgagagaatgcatggagaggctgtgtcacttgaagattgggtaaaatgaatcttccagcttttaaaaatgcccagtgtttagaaaaattgttttttacagaaagtgtagttgagtgttagacatttgagaggtcactttaaaatggaactaaagttacaagataaagcaagacatttattttgcactttaagcgttggcacacaatttaatacgctgttgagagtacagggatggttgcaagtcaaatgaaggttatattataattgatactttgaattgttaaggagaagcgaaggtgaagtgggatgcttttattattatttttgttgaaatcttattaaaaactcttaatggaatgcaaactagaggccatcttcaaggtccccagttaaattagatatgcagccattaatagtatcacttacttgttgaaaataactctgccaaggcagacatgggataatgtattttctcacttctttgtgtaccttaccatatttcttaaacctggagaatataagcctggccgtcagattttttttcccagttttatttttaaaattcttgctatttatattcagaaacataaactagtaagcaatagcattttatttcaatgtttttcagttgggtttatgtacctacacacttgaaaactataatattattaaaattttatataaaaaattaaattaaaagaattaagaggaaatatggctgcagaaataggattgttcacatatagtgatgagagtgtgcatctgagagctgtcatgacaaggtttgcctcatagggtgtgtcctctgggctccttcattttgtcatccttcctagtatatgtcagtagacaaactgaagaaatgacagaaaaagaagcttgaaattcaaggaatactgtatttttcctaacttgtttttaatcagagtttagaaaaatctgttattattttatttttagcaacagagcatcttggttgagctcctgacagaacagtttcctagaagcagaatgtaaaacctactatttcagtgtgcagttgctcagacacacttccaaagagaacactctcgggaagatcaaggaaaatagtataattatcacaaatctttttcataatatagaatgcacaggcctttaaaataattctcattatgcacaaccagttctccatgtggtattctgatcatctggagtttgcaccatattatattatttaattaacctatctgtcctgttgaatcgccacccagcagccccatagtaccttcttatctcaggggagaaaaccgcacacactttaatataggtgcagcatcatgaaaaaccaggccaaagcacaagcaccctgaggcagaaatgaacaaagccaacactttaaactgtggtgtctggaacctgctatgatcatcactgcagaggaaggaagcaattcggaaaacaaattttcaaagctatttttataccgacattcattattttttctaaatgcacacccattctggtactgttggtttttccttccttaagctcagaattaagtcaaagttaatttcctgctatccagtatgttttttgtgttaacataaattgtttagccaaaaccaaatgagaatgcctattcatttgtgtgtgtgaggacactatgggccaaagggataaataaattctgtacagcttatttaagtggcaatgggcctgataggactaacagtcattctactgttaagagtgaacagtttattaacagcttgcatgttttgccagttgcaaaagtaaacattttaaaagtgacactacatacaatttctctttctctaaagctgtcactttccgtacgacaattgatagaatggcaaccctctgagtaatgtttagggacattataagttatggtcatctaatgatgagcagaaaatatcccgtgaatatatacatactttggcttcattcactttgtttatattatcaattcaagagatacaaaaccgtttcaaagaaggttttgttttgccttctaaacatagtatgtgtttgtaaactgttctgctgtgtaatatcattgataatattgtagttaggataagtcaatttgattatataaatataacgaaataattaaaagatttatcctggctatttcattaagattatgaaactacctagagaaaatatcatgagtggccacagagcaccatctgtgtataatcatgagcaatgcacttctgccaatccatgcatgaatttcacacccttctctttgggatgcttaaatacacttctctccctgtgagtgtggtggctcggagctttacacttacattattgagaaattgggggggactccacaggagaagtaaagaaagggaaaaccaagtctagcaccattggtagctgactttcagctgccatgaccagcaacaggaggccagtttaccgggacaaagctaatcaagttcccctttaaacaataattgaggatgataaaaggagatagagaaagacaagtacacaagattaaatgttcccagatgacagtgaataaagaaaaacatttgcaaggcaagaccgaggggaagaagagtcaggaaagagttatttacagcacatacagataaagagaaacagtataataggaaggaactagatgcaaagggaaaatgttgatccactttaactttttgctgagtaaaacttctgacatggttatgtaaaatattccctactggccatcttggatgatttttgccaattaggaaaaaaaatgtgtttagttgtctaagaataaaaaatcttagaatcttagagaaacggaaactaatttactgaggcttgcatttttacagactttgatagaacttatcctcacagaatcagagtaaaatccctgctcccacttgtgccctgctttgagtaaataagccagaggccatcttcatcagagactcttaggtagcagagaagaaagtgagaccagagaggtgagaggctgtgttaggcttgagagaaggaccatgttgcttttgaagttaatagtctcagtcctttccatccactcctgactgatggcatttcataaccagaaagatgtctctgcctgtcactttctgaatccattcttcaaaaccttgtgcacctttagatgatggtccaaaacctgcatcccgatctgtctccacccattacggcagccctactgcagtcctttccaagaactgcactgagtcacctatagctccatggtgaaagcttcaggcttctactcttgggcactagcatgctctactagctagaagatatgtcatcattttatgttcaactaagacctactcaggattcaactaaacaaagccttatatttgcctccaaaatactattttccctctcttcctagctgtacagtagtgttactcaactttattttaaaaacagataccatatattagatcttaagaaatgtctgaatgaatgaaaatacaaaaatatatatcgttgtaattttcatttgttatatgtctaccctgcttcctcattacctaattagaaaatgcaacatttgataaaacttaggaaaacccagtttaccatgtttgtctcactgcagttgaagtgtgtgtcttttgggctttgattctcatcctctgtctgatacagagaaaggctgaatttttcctcaggtcttctagtaagttgttactaaaagcacgtgactgaagaaagccatgggggagagatcctaggttcatttatttgctcagtggggagaggggcttgctatgacccagagtaagtaatactatttacagttcaggtttcagttggtgaaacataggactaaaatggtattagtcattggagtgtgttgtgcagatggtgaaaagtctggggcagccagtggttgaactgtatgatacaaaaagatctcaatgtaaatgaccctcaccaatcttacctaattatgaattgttaatgaaaaagggcagacatatatttaccagttaatgtgactattttagtgcagcttcttatgtccttatatttattgtttatttcaaacaaatttagcagaattaagctaatctgtaagattctgtcatctgtgatccatgcacaagttctctatttcacttttgttattgttgttgttgtacatgttagtgttgattatatagtattgattatacatgttagtgggactcaatatattcctctctcttgatcctttcacactcctactgacctgattcctatttctaactagtcccttccactatagatccaatgaaatccccatcaaaatcccaacacaagtcttcaaagacattgaaagagcaattctcaaattcatctggaaaggaaaaaaaaaaaagaaacagaagagcaaaaacaattcttaacaataaaataacttctgggggaatcaccatccctgagttcaaactatactacagagcaataatgattaaaaactgcatggtattggtacagagacagacacattgaccaatgaaaaagaattgaagacccagaaataaaacgacacatgtatggtcacttaatttttcacaaagaccccaaaaatatacaatgggacaaaagaaagcatcttcaataaatggtgctggtctaactggctgtctgtatgtagaataatgaaaatagacccataattgtcaccttgtacaaacctcaagtccaagtgggtcaaggacctcaacatcaaaccagatacactgaatataatagaagagaacgtgggaaagagccttgaacccattggcataggcagaaatttcctaaacagagttccaatggcacaagttctaagatcaagaattgataagtggtacttcatgaaactggaaagcttctgtaaggcaaaggacatagtcaataagacaaatcagtaacctacagattgggaaaaagtcttcactaacctcatatccaatagacggctaatatccaaaatctataaagaactgcctatggattcttataaaagagtagggccttataactcacttccctctccaagactgaatgtccatagtctcaatcatattaatcactgtatctgtgagttcctgacggaagtagccaagtcatgaccagaagacaacagtccacctcaccctgcccgtaaatcctttctaccactcttctacagtgtttcctgaacttcggctggaatctgatagatgccccaggtatggttgaacacttagcagtcacttattctcagtatcttagcaaaccacaagtctccacaattattgtgacccactgcaaaacaaaatttctctgaccaaaactttcagcagtaaaaatctataaggataaacatccttgtttagatggcaattttataggtacatcatgttcttttagaaaaacaaacaacaaaccaaagcatctatattttcatactagagtctacgacctccccgggcatgggcttttgactaggtttactgtactagacatgagttctctcctatcaggtgagccttagttccaaccagaaagtgattggttactccgataatacttgctaccattgcattggtgggcatatcttgccttgccgaccagcaatgtaacacacagggttaacattattaaaactgttgatgacaatttctctaaataaaaccaaattctctcatgtggtaaggtctttagcttcaaaaattataacatcatcatcctccaattaaggccatctttagaacttataaagtgaataactttctgtaaggcttgcatgtgcatatatcagttgacctctgtggactccatgtatcagttcacccctgcatagaacctttattggtcatattcatactaaatgtctcttgtgaaaccttccactaactatgacttgtaaacctacacttcagttagctgaagctaccaccgcttgaactatggcattgctttactgtatagtgagatgcagcaaccttaagtgatgctggtactcactgttcttgggcaaaaagcagctgggctctcactgcttaactcagagctctgactccactctcttgagtatagcaggtacaatggtgagtgccgtctgctggcaaggagccgtcctctatgtgccactctttttgaatgtttaatatcagtgtttccattatacacattattctgtaaaacagcacgactgcatttatatttagtagggatttctttaatatgagtccttcaaactggattatgtttagcagtcttgagtttacaactatttaaagccattatcacaactgtgatcagtctttggactttaatatataatatgtatatctattatactattactatatacatatataatctgagcattttaagtcacatcttaggcttgaatcacacaatattttaaatctgaatatggagtctatatccaaatgggtcatgatagagtgagcatttaaagcctgtattaagcatctaaatccttttcagccatgcaaaaatcttcaaagacagcatctataaaggcattgaaccatttaatgtccttctgcagtagaaatacaccattgaaaaaccacacatactgtttttaggtcttatatgtatatattttaatggatataagttcaaaatatagcccagtgtgtaatattaactctagctagccttagcagcatgctatgtgatgtggtccagtgtgaatgggaggacgatagcaatgctggtgctaacagctcttactgagtgaaaagcagcactgagggcctgccactcactgcattcttgactgtgtgtgctgcagagccactcactgcattcttgactgtgtgtgtgtgctgcagagccactcactgcattcttgactgtgtgtgctgcagagccactcactgcattcttgactgtgtgtgctgcagagccactcactgcattcttgactgtgtgtgctgcagagccactcactgcattcttgactgtgtgtgctgcagagccactcactgcattcttgactgtgtgtgtgtgctgcagagccactcactgcattcttgactgtgtgtgtgtgctgcagagccactcactgcattcttgactgtgtgtgctacagagccactcactgcattcttgactgtgtgtgctgcagagccactcactgcattcttgactgtgtgtgctgcagagcatacattctcttgacagtttccagacacacagtcaacatgcaaataatgcctgtgaaatgcggggttttcacttcaaagtgtctttttcaatatttaacaaacctttatctgcaattcattatttagtaatagttgtgtaggatatgagcaataaattggtgaacattccccctgttctatgtaaatatttgaacccacgtaaagtcctgtcaaccaaatcaagcctgagtttattcagcgttcagtagctatttgtaaatctctgaaatgaaatggatctactgatataaatataaatttaaccaaccaaagcaaattagtgaaatcagacacatacaaagtagcctggagataaagaaagtgctgaccagtcaagggttagagcagacagtccttcagtccttccctcctgacatacatactttgctggatagctgatctcaagagagaagcaacaaagttagaacaaactatgtaaatgttaaaagaagcaaggcttgttgagattttattcagaataagaaggttcaaacagaaccttaactattctgaacataatagtaaaaccacagcaactacaaaactataattgtataatacaaatattaatgtgagaatatacagagagagtctgcagttaggagcatagacagagcttgccaagaaggcctgcttcctggtcagaaggtcagtttccagcacttaccataggggattataactgcctgaaactctaggttcattgggtcggatgtcctcttctggccaccatagccacctgcactcacggctatctgcactcatgttcatagctcaaacatgatcaacacccatatggaaaggcaagtaaaagttaaatctaaaataaaagattaattaaaaggctaattacttgtgctttattcagaatagagctcttagagtgtggaatatctttcccattcacaatagttaatgaacatcaatccttaggacacaaatttcatcattatatttaatctaacccatttcacctaatacagagagtttgatctggtctgctgattgtgcaccaaaatatctaatagcttatacatgtagacactctatttattaaaaaaatcacttcacatccattatgagctaagtatttaacaaaaattaatgaatatttattatgtgtatgaagaaacacttttcttgataactgaagcaaagaaacatgcattgatctaattaactatataattcaaattaaaattttatgtctatcagcgaaagctaagcaggttttcaagttggaaatgtgatctttatttactcatgtatttggcaaatgtttacgtttctattgtgtacccagcatttttcttggcgtgaaaagtgcaacagtgagcaaggcagacaagtcattctctactcataatatctatctgatgagataagagaaatcaaaggaaggtcaaatacgtgatacaatagcagggtgcttagacaaatatggtggtgagcaaggtagtccagggaaggtacctgagaaaatagacgttaagtcttctacgtattacaagcgagactgtttcagccaggagcagcaagtggaaattgttttgccacaaaaaacaaaggtcagaggagcgctgaaaagccctttgtaggcacaacatcagaagggcatgcaacattggtaagaggtgacgcgtagattatcaagggccaatcccactgcataagcgatgaaaaatttttaaatttaactctcacggcaatgggatacctttggtgaattttgagcaaaggagtggtggtgtgaactatctgcgttttaagaatgccttctaggctgcagagtggcctgatactaggtagaaaaggcagtgtaggacaggaaaaggagctcagagaccctttccctcccctgctcagtcattacagtctcatcttcctctggttttcattcctgagtattttactatcctaaatctgaaaaggtctctaattgtttttttttttttcaataaccagggacttttttttaaatgcatgtatccttctactaatttttctatacctatggattccagtttttagtgataattcctgttaacatattatgcttaatgcttcaaattgctacaatctaagtgactatgaacacaaagctaaagttgacagatttcttttgcatgtatatgtgtgcatgcttgttcttggtgtgctcacgtgtgtgcacatgcatgtggtggtgcacatacacatgtgagcatggaaacagagagcagcttgagtgcctttcttcatcatgctgcaccatactgttgaaacaggttctctcattagttcttattactcactgttgcttgacaagatctagaatctgctaggaaagaagcatttaggcccagctgtgaaggagttcaactgagatgggaggtaggccctgcctgcataggcaacacgtccctgggcttggatccttgactgacttttcaataggcaagtcagatgatcgtgagtatctctttatcgttcgctggctgtgaatacaatgggagcagctgcctcaagttcctgactccctgattttcccctagtaatgagctatgcctggaacttgagccagaatacatgatgtcttccttgctttcgtcagattaatttatcacagccatagggaaagtaatatctccattgcattctggaactcaccaacaggatggactgactggtcagcaaggtaccaaatcccccaattctccacctgcccggcactaggcttagaaacatgcaacaggtgctcattgtttatgcgagtgctgcagtcagcttttcctacatgcatggcaagcattctaccaactgtgccagctccccagcccaaagtcatcacatctctgtacaaaaagcttgtgtattttaaattgcattcgttcttattgaagtttcatatttaagacatactttctccagcatgggaaaacaaatgattttcctattataaacttgccaggggttgagcaggagctgcccaaaaatacaaacaaaaattactaccttgttttacattttacattgtaatcaactgtaagttgacttatttaaagagaaaggtaaaagatattatgtaacaatatgaaacagtgggtctagtttctcttgtttgctctttgttttgtttcatgttgttgtgtttgctgtgacagatatgaaagaaacctagtaatagaggaaaggcttattttagctcacacttctaaggtctcagttcctgcttgactacagaatggcacatccgaaagctctggtggattagatggccagaggggcggggggggggggagcagactggagggagccagggcaagatgtagcctccaaggaaatggacccatgatccttgagccaggtctctcccatcgctgtgataaagcaccattaccgaggcaacttgcagaagaaaaaaatgtatttgggcttgctatttccaagtgatactggtgttgaaagcacatgcagccaagccagacttttctcctgggtactaggcattcgatctcattcttgctcagaaagtattcttgcccacagagccatctgcacagtcctcaccggagtgttaaaatagtgagcgtgttgcccagttttagatcttagctgacactgactctgaatttgttagtaagtcattggtttataagttttgttaaaatgcatttttgactagaagtaattcagaatagccttttaaaaactatttttctctagtggccatttactataacaaacaaacaagcaaacaaaaaaccctctcatttgattatgcaatataaaaagtctcccaaggtctgagaattgcacttatctatgcgtaatgggtagagagacacaaaatatctccatgcaatgagttaatgaaggaactcacaactggtcaaagtccaaaggacaagtgctcagccactgagcgtacctctgtatcacactgccttcaaagctcataggctaccattacagaaatggaggcagaaagattctaagtgccagaggtctgggagtggcacagtgaatgagacagggctatgaactgagcctgcctgtgcaaaactaccataaaatcaagccagtcagtgtgctagcttgcaggggaagaggctcacgagttcccacccctaattgaggagctacccctaattgatggatttggggaaggaaagtctgttttctatatggatgtggccctttggtagtcacaaggggatagccctgcaacaggaatatatgggcagcctgaattggactctgaaaaaaacgcttacaaaatggagttgtatggaatttgatggggaagtctcagaggagttcaagggaaagtgggggtgaaactgatcaaagtatcttgtatgaaagtttcaaagattcagtaaaaatatttttaaagcctactgagataaagccaagagcaggaacattttgtacagccatgcttaagagcaggaatgcagacgttttaattagaataaaaagaatagcaccattagcaaataactctaccatgaaaaactaaatgagaggaaggaactcactgctgctttaagcatgttgccatgaactttatcaaaaaatccataaactgagtttgtttctatcatgtcccaaagtacaagataaatttatctcattcattttatttaaccagatagatatatagcacatttacattgtcctcacagacaacatgtaaagccgttttcctatattattatcagagatttttgaaccttttcaggatgtttccatgctaaaggctgagatccacaaacaacaaaaaaattgtcccctaaacacttaggctatatatacgtattactgaatattttgaagaaaagagagagagannnnnnnnnnnnnnnnnnnnagagagagagagagagagagagagagagagagagagagcacaaaaaacaaagaggagcagatcctggccacaaacaactaggagttacattaacattatccaggagctggagagatggctcagaggttgagagcactgaccgttcttccagaggtcctgagttcagttcccagcaaccatatggtggctcacaactgtctgtaatgagatctggcaccctcttctggtgtgtctgaagacagctacagtgtactcatatacattaaataagcaatataacaaaattaacattcttaacatgtcttattactgcagtggtattctaagatttcaaaagaatttctaagatttctaaaacatgaggtaaataagtaactgacatctatactttagagaaaacaaatagaaatattaaaagctagaggagagttatagttgtcatatgtttaaattaaaatacatggtgatgctattaatattttgcaacatataactaaaagacatcagtctgtgtgcagtcccaaacatgacaaaaaccagctctggatggacagactgtgattagcacacacactgattagttctttaatcaaaattaaggagtaggggaaagcaggtacaggttgatggctaggctgatagttagactaatagaataaaggatggagaaagagctttctgaagcagggaaggcagcagaacccactcattcacagaacattacataagcgtgactgtttcctctcctcttgtatcccacggtgtctcttctgtatatgtgattaactgggtcctgttttcttggtggagtctgtggcttgtggaattgtgatttttaactcagtctagacaattatacactaagcatatttcagataccaaaactaggccagggccctaattaaaagatctgtgctcatgtatttgtcactaaattgcaaagataagtgaacacgcatgttggggattaagttaccgcgtgtaaagaaggtgaaggagagagcagcctgaaacagtaagtagcatcagaaaggaatcattctagaagacaaaggatgactgggtcaggcaagttagcaatcatctgcaatccacagatgagtaggtattaggatgatgctataaaatcaaacctaggatccccggcggcttcttcatacatgggatgataattatgttaggccctgtgctggggattggagatggcagatgaatgctcagtccatttaatagaggcttcagcagagaagcatcagcaaaggcgacaagggactcagaagagcaggatggactgaataaacagaaactgttgctggtgtcactatgaagaaaggaaatgatgcattttaaagatcatcataggtacacctgtggtatcccgaggccacacatccacagctagaaagtgactcttcaaatcggcaaggtccattaaggatatggcaatgtcagttatttagaggcaacaagaagtaagaatttcagaagagaagcaggctttgacatattggatactaaatcagtgagcatacagaggtcaacaggtggaggagaatgggaggagtccaatgctagttggactcttgaataggagaaagggacttagaagcctcttgtcacaagccctcagaaatctatggaaatctttctaccattgctgtctcagtctagcatcagatcctctgtgaagcccttcatcactatcctccagacataactctgagccctccgggatctcacagtgtctactttacacctagatggcctggcactgatgacactatgttatggatatcacaactcctcctgttgtgatctctgtggccagctgggatcacagcaactgataccaagtaaatgctcaaaatcgcttatgggtctgctctaaactaaggaagatctgtagcagtgcaaatgtatgctccatgttggagggaaaggatggcaataaaagtctcagacccaccaagacctccaacaagaggcctcgtgcgtccctgtgagggaaccatttgtgaaccccagtctctgcttatgtgtatgtgcctgtatatgtgtgtctttgtgtgttaacgtgtagatgtgtagttgtgcggatgtgtgttaatccttatccttcacctggtttaaagaagggtaccttatgatttaccattgcataatgccagggaattagcttctaggagttcttccttctctgcctcctatctttccattagctccccaagattataagtgtgtgctacagtatctatcttaagatgggttctgaggatccaaactcaagccctctttactcactcaggcacacccaatcctatcctgacttttcttactttgttgttttgtttttcaaagcagggtttctttaccatttcttactttttaaagcctaatatttaagggggggaaagcctcagacaaaatgttcaaacatttttacttaaacttcttcatcccgaggatttgggaataactcacaactattcctggctgacagcatagccacatcctcattccagactcatttcagagcaatcagatctcaccggtaaaactgcaggaagttaatgacgaatggctgggttgagcttgcaaactaaaatgccaccatgtgttctcgtgcacagcactacagcgggcaaacaccaaaagaagaaacagggaagagacagatttgagtctttcatgtgataaacactggttgaaagtcattttggtgaagatgtaatttcaatcttaagcagttctttacagaaacattaccttatttcactggaatctcctctctctctctctctctctctctctctctctctctctctttctcctacaaactttatctaaactttaaaaatacagatagttcaaagtcagtgcaaaccaaaaaagtaccaagattaataacttagctagcataaaaacatcaaaaaactaagattttttttcttgtgaattattaaatattttgagcgtttcagaagtaatctacctttgttcatccctgggtggatttaacaaatataagccatccagcatttttcttctgattttttgtttgtttgcactattattgttgagatagagtctcactatggatccctgactatccaagaatctgttgaatagaccagcatggcctgtggctcaaagagatctacctgcctctgcccactctaagattaatggggtgtcccactatgccctctttgatgttcttgaagaaatatctggtgcatggttggtgtccaaggagaccagaggaaggaatcacatcacctaggactggtgttatagaaagttgtgagcagacgtgagggttttggtaatcaagctcaggttcactggaagaggagccagaactcttaacctctgagtcacctctgcacccctaaatattattttgaaagaaaattgcatattattgacctgcaaattgataagggaaagttgaagcgtggggtgatcataaaagaaaaccagttggcatgagctctgattgtgcaattagctaaagccagcataatttaatcagtgctcaattacataagcatgagctttgtgactataagaaaacaactgatacaaaaacactatcatcagttgctcattgattccatgaggactgacaacaaggagactccagtgttacctggcatttctatcttggacgtttttcagtagatatttgtactgcagttttacacacacatgtttgcaacacactcacacacacccattcactgtttatctctctgatcttgctcatagcaaaggaataacgaaagcttaaatatgccttcctgttagtttgtttctgtttttgtttaagtgatggagatggagcccggtatcttacacattgaaaacaagtatcttaccactaaaccactgccgcggccctctttttcttttactttgaaccaaggttctcaatatgccctctttttcttttactttgaaccagcgttctcaatatgtcatttgagccctttatatggatcagacaggtcttgagctcataattttagtgtctcagtctcctgagactgcagcaacaggtttatatgtcagctataaccagatctagtggcacaagtttataatctaaaagcatagatatgtcagagctggagaaacggcttggccatcaagagcacaggttgtgtttccagaggacctgggtttgatatccagcttacaactgcctagaaatccacttccaggtaattgaaggccctcttctgtccccacgagcaccaggcacatctgaagtgcacagagagacatgcaggaaagcactcaaacaaataaaataaataaaatttaaaaataaaattaaaacaaataagccataaaataaaaaacgagatgtgccatcagataagactacactatttttcctctgaagaagatggtcatggatcttcttataaagaaagaaatagaaattaaccagacaagtagaaacttgcttgaacaacgtaatggacaaaattttcaaactaactcctttaacaaaatgtagaactataattcatgtcctgtttcttgtctttcatgaataaaatccaaaggcaagagataaaaaaatgtagtttcctggaaatctcagctgtgatggagcccatgtacgtgtgtttcttttaacctcttcttggctgaaagcatgccagagggccagcttcaaatccaaacaggaaacacaataccagctgaagtgggaggggaaccccagaacactgtttgcagatgtcactcaatgtgatcgacataagggggaaagtagaggttttgtccatcacaagattaatatttaatgtaatttttaataatccaaatttcatgcattctgcctccgtgcacataaagaccatccaagcaaagcagccacacttctggccatcacaattcttggttatgacctctacaggcagagcagccatacctctggtgaccacagtccttggatatgactcatacaggcagagaagccacacttctggccatcatagtccttggatatgacctgtacaggcagagaagccacacctctggccatcacagtccttgggtatgacccatacaggcagagcagccacacctctggtgaccacagtccttgggtatgacccatacaggcagagcagccacacctctggtgaccacagtccatgggtatgacccatacaggcagagcagccacacctctggtgaccacagtccttagatatgacccatagagtcagagcacacacctctggccatcacaatccttggatatgatctgtaaaggcagagcagccacacctttggccatcactgtccttggatatgacccatacaggcagagcagccacacctctggccatcacagtccttggatatgacctgtacaggcagagcagccacacctgtggccatcatagtctttgtgtatgacctgtacaggcagagtaaccacacctctggtgaccacaaccactgcttgtcactggcatgttttcaggcttgatggcaaacagcatgcacgtgatgctaatgaagagctttgcttcaaaatatttttaaagatgtacaagaggaagagaaattgtttactttgattattttaagatgtaaatgcagctgcttcgaaagaggaaaaataataatcaaggaaaaaaaagagggtgactgtgatccatgacaacagatcaataattagcttttgcaatggttctatctcatgggtggaggaagggtgtgagagtgcttcctgctgcaggaccgaccctcctttggtcactaaaacattgtcattagttaagtgtccattccctggattgggttttattttaattctgagagccaagctgtgtatacatagaatgattcttctgtggttatggttgttttcctggtgtcactgttgaatagaacttggttagtccctgtcaccacagtaaaaatataagaaaggaaatccatcttgtaccacatgctcagctcctccctgagtctgcctgtccatctggattttgaattttgaacacaatgtgggaagataaagaaagcaaggaaaagtagatcaagagggacattgtggtcatatttgtttcctaatagtccactctgctgtgccttaagtagcaaccctctaagcctattgattcttccctttcttctatataacaagtgtattgctgtccagctttgtgtccttgcccctctataccacagtgccttgtagtaagtggctctcattcgtagtctattgtagtgtagctagcattatcctttgcaagtacagctttgagcatgctgaccttctcctcaccctgagctcagaaagctttcaggattcacccttgcccaaaagatgaaggctactccttggattggaattgagctccctttcaatctacctggacagctgtgattccctttcaatggaaagagctcattcgaatcagacagatctaaccatagtcctcccgggacttgaggctgtcactctatacatctttcccccatgtctctgcccaccaccgcttgtccccatctaaatactatctatgtctttctagacatttccctttcttcctcttcctcttcctcttcctcttcctcctcctcttcatcttgtgagtccagagaatcagaaggaggataaaacaaggacccatgcacaaagaaatgtgctagccacttcagctccctgtcctttctcactagctggtgttggtttacttggtgaaccaattctgctgaatgtcccatggtgctctaaaccaagacattttctcacctatctctgcaacctaatagtgtgtcactaaatgtcatgtattaaagcattactaaactcatcaggatacgatataggtgaaaggaaaggatgtggtgaaccagctgtaactaaagatgtctcagtggatgatccgtgctatcctagactggaaagctaaaactctggctccaaatactacctggagagccccaccctatccctgtgcttcagagtggctcacgttgaatcttacttagggatataccctggttaaggaaaagagtatttcatctaatcagatctccaaggccactcaccagaatcacccatagtgtttgatcccgttccctggatctcagaccagaacagccaagaacctccgggtttcagcccaatctcgttggcttctgaactattctacaaaccattcatctgcatccaggttagacaggaaagttaatgatgaccaacatttgttgcaatattagaaatttacagaatctttgttaagcaaggaatatatgaattactccatttagtccctacaatgctatagtcactccattttcacaggtgcagattctaagacttgaagaggttaaataactagtgtagtaccacactgcttgtccataatcaagcctaggtcatacataggcctgataccaaacccgaagtttacatcacaggctctatccaacttgaacagactgatgtgtagccacccatcttttcccaagcagaaattccttctggtcaacacgagattctgttttggaaagttctggcagcacctattagaaagaatttttttcagctcagtttcctattgactatatacttggctcttatccagtcagagtctcaatattccaagatcttccctgtagtaggtcaacttctaagattctttatttccttacaaaattatcaacattaatagcaagtaagccacttccatgtataatatatgtcttaccatgagagagacagagggctatggctcagtaataaagagtactggctgctcttacacagcatctaggttcaagtcctagtacccacatggcaggtcacaactgtctctaattctagacctaggagacacattgccattttctgtggtctcagtacatatcaagcatgtgtgtggtgcacagacatacatccagacaaaacacacactcatatgttaatttttaaaattaaaacatgccttatcatccttgtaaaaatcccagtgcatcctggataatattcatggagatggatattgctcctaggttttaaactgaaagaactgccatgaccataaagaaaaaactcacatgagtgacaatatgagaccagccagctttactctcagttgacatttttctgcccttcatatataaagcttaattttctaggacattttcacattttcttcctcatttttttgccttcacaattcagaatcattcctgcactgaagtttctttacagataaaaatactcataatcaacttccatcaaaaggagaaatgagagctaatgagtaaatgggcttaaagtatcacaagagtctggaatgagaggcgcatgctgttttactgttattaatgtaatgcagccatccatcacagtgagcgcagacagaggcctcgtttgctggcctggccagagtgggtctgtctcatagccccagagacaatcaggctcaatggaaaccaatgacaaggctcaaaacagcccagaaaggcagcccctgggatcgctatgcaactggatgctttcaaatggattaggaacgttagacagtcaaaatatggcatggacactgagccaaggaccttgagaaaggaatgtgtcgccatgtttaatagatgaaacaaaatctagtgaaattagagggcgaccgcaaaccagacgcatgaataagtaatctgtgagctggcagggtttgcttcctcacacttaggagatggcaggcattcctaaacacgtgggggaaaaagcatttaactcactgtacaccatcctcacaatggtcatttcagtgaggcagggaactaaattaatgtcaaacttcccaagtactcatgagtcaattataactgtatgccggtcatcataggtactaccactcagttcctatactttaggctttgtacagcatcctggattcttttgcagttatttctttccttccctgtgactcagggagctaaggttttcagtcagtgttaactgtatctgaagcagttggtggtggtggggggggggggtcatttcacatagagaccctgaaattattattttcaagtatggctgattctttgtctttgtagctgagaagaaaagaaagctatataatcgcagtgtcaaaatgtcaaaagactgagatacacaggaaaaaaaggaagaaaaggaaagaaagcaaaacaaaaccagaccctgaaaggcacgtgtgccgtgctcagccctccacatccgggccttgcatgtaatgcttgtggcatgctgtaattaactagttactcctctcagaatgaataataacgcaattatttgccaaaagcagggaagaaggatggtttctgtttttaaaaatgaatgcctttcatttctatataagaaaaaaaaatactggattcatttgcatattctgctaaagccagtgacctgcatcttcaccattagcttgtatgataattctgccaccttcttaccagagccttatatatttttcagtggtctgaaggagcaataaactgtcaaactgctaccacgttcacattatatcagtacctagaactacacccaaatatcacagaatgtatgcagtgactggctggtgaaagtatctcctctggcaagtgggatatctatgccactgtggtcatcaaggactagtattgtgttttcttcagctgtgaaaagacaaacgaggaagccgagagcctgagttcttacagccccttctccatggctcatgagtcaaacagcatgatttggtactgctgcactgatttatcatatcactagctatccttcccaagttctgtcaaaagaaactttcaaaacagagctatcagagacagaagagaccagatccaggaacgagcagtaaaactgaggagcacctgagactgtgtgagcctagaaacagaagttttgtgacagaacaacgggagagtaaggaataatttttccgtattgagttgggacagccccttaagcataagacctcggtgctctgtgttgcttgtgttcatagccaacaggttatactggttccttccatgtagcaaactggtgtctgagtgaccatgcaactatctccacgttccttcactcttcaccctccctggtcccatttcctctccagttcccaggccttttaatggaggacatctctaatgtttttctcatcggtgttggtgttgagactcactgactgtatgcttgaattccttccaagtccatctctgcaattcacttaacaagggccttttaattgaagatttgctctaatgcactgtgctaaatatcagaaattcaaagataaatgggataccttgatcctgaaaaggttaaagaagagcataaatataaaataaaaaaataaagaacattatttattcgaggcagtgcatactactgtgaggtagatgagcctcctagaaacagattcatcattgctaagaaggaaagcaatattaccccaggaagcagaaactcaggtaagattgctaaagcatgcaactttacacacacacacacacacacacacacacacacacacacaaacacacaaacacacatgcacatttgagtttatttcagtggtttgtatgctttgatatggttgcataactatttaactgtgtatgtttaaatttagccaagtttattcatagctttaagtggtaagattaatgcaatactcattagattagtaattcattctaatagctggcaccaactcacagttgcataaaagtatccctcaacaaagtgtgccaatgttacaaaagttttgatcatgtgtttggtaagacaaagattaagaatcaatatgaactaaaactattgtaataaatagcccaggcgtggacacagcatcactttttaaatcctactcattcaaagaatcccttccatcagttatgatatgaatgtgcatccatcttggttttccttgaacttcaatttgtggaatggtacagtctctggcgtcaggctgcctagatggaaaattatgttctgcttacaagctgtacggcttcctcaagactcaattttcttacctattagatggagatagtaatagtggctgcccgtctttgcaaagtattaagtagttacttcttcattccacttttttaccaattgtttttcaataactacacagttattgaaatttgagcatacctaaaatagtgaataaaatgaggacagcaaagataattcagtcattaacaaaaagagaccatgacagaaactcagactaaggtcttagatcctgcttattgttgtaattcataaagctaacaggcttaaatatataaaatacagtaagtaatggtggtagagtcagagtttattggtttaatggaaacgtatacagagcaggtctttgcaatccatccagttttctctctccccgtaccacatagtttccgagccacatcaccttgtctctgaagcttcttccatatatttaaaaatggaaagagatgggaaagcagaccatcaggtaaagttcatccctcccatgtgccaagcccttaattatgtcaccagtgccacataaactaaaaggtaaaacaggaggatggcagaaggttaaggtcatggctatgccatgagttccattccagcctggactacacaagacagagagagagagagagagagagagagagagagagagagagagagagagaaaagaagaagaagaagaagaagaagaagaagaagaagaagaagaagaagaagaagaagaagaagaagaagaagaaggaggaggaggaggaggaggaggaggaggagnnnnnnnnnnnnnnnnnnnnnnnnnnnnnnnnnnnnnnnnnnnnnnnnnnnnnnnnnnnnnnnnnnnnnnnnnnnnnnnnnnnnnnnnnnnnnnnnnnnnnnnnnnnnnnnnnnnnnnnnnnnnnnnnnnnnnnnnnnnnnnnnnnnnnnnnnnnnnnnnnnnnnnnnnnnnnnnnnnagagggagaggagagacagaaggagagacagaaggagagacagaaggagagagggacagagaaatcagagggaaggagggagggacggagggaggataattcttcatcaatttccaatttaagtcagtcttgagattaagaagatagaacttttaagtgcctgcttgtgtattgatatatggttgtatggagagtagtgaagagtgtggaaaaagaccaacatgggtgtatgcttttatgaagcttagattctggagatttagtgaaaactacatctcactttcacttaagggaatctgacctccttttgaggcaataatgcaatgttgacataggtacttttccatagccattccccaaaactgatttatttgaggtaataagaagcaaatctccaagaaagctgggactgagcaatggcatgagcagaccaaactcaaatgagtcacatagggtgggcttggggactgacccctggggaagagcatcctatcaaatgccctgaaaagttgtcagtgaggtgctgcggctcggtggaaatgctgaccctgggcgcatcaactcagtcaactagtctcttctccttgctgttctcatttcatcgttcagtttgatagtaaatggatttcagaaattataattactttaggccagttacaaactgttcattcctgagcttctctgtaacacctccactgccatttctataggcagataaagcagtggaccgttcagtttgttctgcttgcataaaaactttataagactggaaatttttgaccaatagttcaaacctaaacaacctttaaaatatcaagaactgtctttacacaatgaggcaagtgggcctcaccactctggtttatttttaagatcagtgttttgggtaggctttgatagttggggccactccttaagggccatcatgagaaacgcacgccctctgtggtctcaggcagctcctgatctcagttgctcagataccaagaggcaacaacattggactcctgtccataatggcagagagagaatgccaccctgggcaggggtggggagggcagggagcttaaggattcagactgttgccacctgtcctcactattatttctgaaatagattaatataaaggtaatcaggtactactagggaaattctaccacatgcacaaaaatatactttcaagcacactaatgcatttcctgcccatattttagcagtggtgtaggtacagatgatctcaagactacatcctgaaaatgcctagtgtataaaagagcctttgctgtattgcattgatcaagcatgattctcaggcagtgaatcttcaggttccagagttactacttaatgattaagaaatctaggcttctaggtaggacctcagcctccacggggcacaagaatctgcttgtcagtatatgcttctaaagttctatgggcaatcctaatgtgcaggttgcagtataaaaggagaacaggtaggcctcacatatcacatctgtgtgtacctgtcctataccttattagctttttgactttatgtgttgtctaatatagtggtctgtgtaatggctgctgcaaagtttaaatgaaacaatgaatttaactgtcagtatgcagtgagtgattactctgtgtgtgtgtgtgtgtgcatgtttatgtgtgtatgtatgcacacgtacacatgtagcaaattaaaattgtgattcacagcataaagaaaaacatacagagtaatgaatacaaatatgaataaatatatttaaaattttaattttataccagtttgcacacaccaaaaaatacaatatattaattatttatatttattattttaatgtgtataagtgtttctctgaatgtatatatatatatatatatatatatatatatatatatatatatgcatctatatgcatatagcacccgctgagcccagaagagggtgtcaagttccttaaagctgcagatacccatgtttgtgagccaccatgtgggtgctcgttcctctgtaagaactgcaagtcctcttaaccaaaatataatatcccaaataacaaagtaaattataaaacaaacaattaagagaaaattgaaaaataattttataaagtttgttttgcagtgtttaattgtgttctagatgatccaattctctttaattcaccagatgtttctttagcctataggaaaaaaaaaaaatgttaaagccataagtggcaaccaatttgaatttgtcactttattgtgtaaaataggagctcaaaatagaagctgtgtaccatgggaaggaaccttagaatgtgcagaaagaaacctgagaaccccgcgggatttcatgtatatgctgtttataggatgtgagcatttctgagagtctggctacacctttcgcttcactctggaaaggtatctgtggcactcggaaaggttaaagaccactgaaggttcccacttactgctcttcgtgcccactctcctttgtgttggagaaatacctcttctgatggcgttccaaatagcgtatttgattgtgttctgttctactggcccctgggaaatttttctcaagctctccccgtttagccatccaatgaagaaagtacaggaatgcacttgagtcacgtctgaagccattctgccacagtagcctatttgtattcttcaaacatccttgtggtgtttatgcatgtttatttttgattcattgctgggtcctctggattatttactactaggtctgtgttgcatttcatctcagaaagctggaagaccttctctggaaaagcacaatttgattcttctgcattttgcccagctagccacttctcccatttgtatttcagccacagtgtggtgacatcactactgacattccatgtattattttgctcttcctttaggtgtgtgtgcaacatagactgttctcaaaccaacttcaatcccctctgtgcttctgatgggaaatcttatgataatgcatgtcaaatcaaagaagcgtcatgtcagaaacaggagaaaattgaagtcatgtctctgggtcgatgtcaaggtaatgttcatagcaaaatttcatttcaaaaaatgtttttagtcactgtgcagaaatgaaaagagaaggataactcgttatcaggcacctatttcatttccaaaagacagttctgattcacaatggatcgtgtagtcagctgtagaatttgtgttgattatgggtgtttgaaggcccatcagcaacagtgcatgtctttttcaatgtaatggggctgtattgtgacagtgccatgaacgcaggagccagtattcagaagacagcagaaattctcctggcaaaggctaaaaaaaaaaaaagtctagtcaagaatttttgaatagattagaaatcttagaattaaaagcaattgctctttttatgtattgattcgatagaaatattttaagtacatccttaaaagctaaacaggatagaacattctggttttgttattcaggaaaaaaatggcttagggagcttgcatttgattttcttttatcattatatctcagttatagttctaaaccttcctgtcccaagcttcagaaagctaacactgctgtgtgactcacatagacttaataaaagtgcattgaaaatctgattgtatagagtgctcaaaactataaatggattgttgttgttgttgtcgttgttgttgttgctactgttgaggaagacaacaaaccttaactaccatgaagaaatgaaggtactttggaagagcaaatttgatagatgtaggaaatggttaactgcgttttattgttaattttttaacatagataacacaactacaaccactaaatctgaagatgggcattatgcaagaacagattatgcaggtatgtaaaatttcctaggactagaatgagagcctgtttgtgagagccttgtccaccactgtttacaccttgagtaccgctgtttatttactgtttatttactcctaacctgggcatgcactgctctttcttcgaagttcaagctttcagtgggcaagaaggaattttttattgaactaaataaggcacacttttttttttttgccatagttaaagcaattgtcaaagatgtcagtaagatataattaacttgttttgacagtgtaaatggtacaaatgacaaaacatttatcaaattaatgggcatcaatggaaattaatgcaaggtttggcagtttattgtaataaatgcaaatgttcttgtttgaattttcataaaagtcaacagtggaaagtttgctgatctctgacaagatagaaataaagagagttgcaagagctaacacaaggctactatgaagatacagagttgaaattcatgaataatttagtttttaaagaaactaacatgtctcatttatttagattctagaatgcggcttctcagacatgcaaagttataataaactttatgtgaaagtataaatcttatttagcaactatggaacctactttgagtaataaaaatactacctaatttaactcttctacagtgagcaataattgatggaatgcaactagcatattatcagatgactataatttatgagaatttaaggtaaaattataaaaataaaattattgagttctatgaaagtatccaatgaatatttatttatttattcacatattcatttttgctgttttgagacagtttctctgtgcaacacttgctcttttatatgccactatgtagaccaggctggcctcaaacctgtagatatccagctgcctctgcctcgttagtgctgggattaaagacacctgccaccaagtacagcttcaagggatttttaaacacaacgtttcatttagctactgaacacttgtaaccaattttacaactaatactcaaacccaatcaattgtttcttgtcattcaaaatatatactaccatttttttcatctgacttcattattttattttacttaatgataattgtcattatgtttttacttgaacaaagccctggtaatatcttaattacttgcatgtatcagaatgtggacataagaggaatttaacttttgcatattttgtcttaatgttttcaagcatctagataagactgacatattgtaaattcctgaaactgccagttatccaatatattaactttggttctattatatgtgtatataaccattcccaaaacaccactgaagatattaacagatgcttattaagaagaacaactagtattcaggtcatttagggagtgttaccataagcaattgatcttctccccagctttcttcccttctttccattatacagtctttacaaatatgcatgttttgtgtaaaatcctctgtcagagagtgggttctggaactggttccaactctttacaaacaccaaagtctaaggacactatagtctcttttaaactggacttctgtttacatattacccatgtgcatcttcttctatgtcttagatctagataatttataatacttaatacaatgtaaagtctatgaaaatatctgtggtattgtattgcttaaggaatgatgattttaaaagctctgtacacattctggaagatgcaagtgcttcacacatatatttttgaatctatgaatacagagctcttggatatggacagccattttattttaccttttttaaaatttctaatgtgtgaaattcactcaaatgcatgtagtataatatcatgaatcctcatgtaattatcttaaagaagaagttacatcaactcatggctatgtcttttctcctcctcctcctcttcctcctcctcctcctcctcctcctcctccttctcctctctctctctctctctctgcctctctctctccttccctgnnnnnnnnnnnnnnnnnnnngataagagccctccccctacctatatagatccgataaaatgtcaaaaatcacaactaaattttatcatacatctcaaaaacctttttaaaatcacagcactataatcatctcttaaatacttccaacctcttatagtatacaatatacatcagaatcacttgaagaatagcacatttttgtaaaagattttgcaggactagtgctcccaaaattgtactccaccaatatgttgagccatagaaaacttattaaaagtaataaaatacaatagtgacatataatatctgagggtgattctttatgctttaagatttaaatagaaccaaataaaaatattacattttatcataaacaactatcttgatggtattataagctacttctattaaatgcatttatatttcctgtaaatgatgactttatatttcctgtaaaaactaattcatatggaaaaatctttaaaactgttgcatctgtgactatcctggaaccattcatgacaggacttataagagtcaagtctttccctgaggatttttttccccaacgaggaaccccagaggttcattggcaccctgtgcaatgcctgtgtgtacactcatctgtaccaggagattccaatacagggtctgccaccttcatctccattcacattgtatagcacagttcaccttcaaagaaaacagtgggttgcatttctactccgaatatattcaggtttgattgcaggcagtgaacctctgatgctgattaccactctttttagttcactttgttttttattttttattttaaaatatttttctccattcttttctttgaaaagttcatgcatttaaacactacattttgaacatatcaaccaccattacttccctccagctctcccagtaacctctgccttgtcatcctcccagcctcacatccatccatcgtttgttcttgttattatgaccccgtgagtccagctgttgacagttgctgaggaagggagggtagctctgcctgctggatgtgggctggttttcccatgcccccactgatggccccacacctaagcacataggagctgcacagattgttttccgtcctaattgtatctgcttggtgcacatagaaaagaacatttcccagtgaacataatcaggtcactcagcatcctagagatttctctagtttgacaacagaaagtcttgtaagatgaaaaattgtcatgattaaggggcaacaggcagactgatcaggaaaaagcacttgctgctaactctaatgatcagtgtttggtccccagaacccatcagatggcagaacaaccagctcctgcatgtctcctgccacttccatctccacactgctactgggcgtgcacaagcacacaccgagacactaagtgcacacaaagtaaagaaacaaatgcgacaatttctaaagttatgtttaagcttgcatgcttgctagattccaaataaaatagagaagcaaaaaagttcattgaaacttgcaactcatagttaaacatggactgaatacatgaagtcctccctgacgttacttcagcttcacatgatttttatacatggttttattgaaacatataatattagaaaacattgaaataattgtgtttctcaacatttcctagtacccagcaggattttcattttcccaagtttgggacatagacatgaagatctaaaagaatcaaatgaaaaatcaatatgttattgtctggataatttatatttcacatgttataaactctccaaggagggtaaacaggaactctatgactcacatccctagaaatctgctctgtgctcacaattaatttgatgtcacagcaacttcccttgttaaacaaatgtccacggacgctcccactggaaggaaatagcagttgtaactcacacttttccagatgtggcatgagtactgtaaacttaggaacttttaccatgccctcccctttcatttttgagcctactttaaaagctggcaacacttgcttctaactaaatagtggctatcttctttaaagaaagtctgaatattaaaataaatttattgaacctcctttgtaataacatctaaaggaaaggcttcagccaggaccaacagagactggattacaactttaatttaaatagattttatttattaaataaataaataaataaaagaatactatgtgaaacaaaagtaacatatgcaggaagctagaacgtgtctaccttgtacagagacaggaatctatgttcctcataggcataaaagtgtagtccacaccagaaaactgaaagaaaaatttccatcatatttcaagcagaattactatctgtttgggctgtctggaatcaccttcctgtcctctctcttttaatgagacccgaggcattttctgactcttgattcaaaggctttgcctctctgtttgccaggcccagtgataagttcctgccatagaaacagaacagaccctctgataccagtccacaagcttagacttaggtctcttttttttcactacagaaagagccctaacccacgggttttctaaatcacaaaggtaggacttcctggctttagcatatgataatatgataataataatcttcccttgtggacacgtagataagatggcacactgtgtgtgtgtgtgtgtgtgtgtgtgtatgtgtgtgtgtgtgtgtgtgtgtgtgtgtgtgtaccctcaccaagtcttgcactaaaaggaaagtgaattttaaaactgtgcttctctatgtccaatgtgtatctatatatgtgtctcctgatgggttcctgtctggctgagaggctcatcaagccttggaaaacatagacacatattttttttccagtgaaaatgtacttaattttatagcttgttagatgttcacaaaaaaacccataaatttcaactactttagtttttatcatctaaaaattaaaatgtattttattttgtggtatcctacttatatcagtttccaaaaaggatttgtggtgtttttataattaaactacagtcaatgagggtctttaaacagagatggacaacatggagagctgaactgttaggggaaagaaaaatacctgagcatggctattccggttaaagcacttagccctaagcttctttgcaaccagtataagaaagaaattatggttgagtcggtttatttcacaaatatccggaaagtcctgctatgcagcaatgctgtcccaggctctacagaaggcagcacagaagtcccagtctctgtgaaaggaacctgggtcttcattgtctggaaaaaatgaataaaaataatttcagagaccaaagagaaagttaactttgctaaattatatgtgaaatatttagcacagatctttttatgaaccataactggggaacataaatggatagaagcttcaaccatgatatttataaaatatcccaaaaagctttctgtatagctgaggatttttgaatatttttttataaaattctagagcacaaaaagtaagatatgtatatctcaatgacacagtgtttgaaactgattgaagtaatgagtccattcatgaatattctaaaatggggagggattaatatcacaggaaagtggtaggagaatctgtaaggaaagcaagtctagtttattacccctgagtgagcagaataaagacctatgacctgtgtaacaggacagatagagcctgggttggacagacagtgctcagtgacagtgtgtatgtggctggagaaagtcccctggtgttcatgttggtcaatgagaaaggaaagtcccaggctctctgtgccttcagaagagccagggcctttctcctctgggtctagtaccaaacagagtctacctatctcccagagcattgctttgtggtaattcaccgtctcttgtcacttcaggaagtcttaagttttaggaaacatttcttttagagatgtgcttccctttaaacaataattgagatattatgcacaagtctgaaatgtggaagaaaaaaatccagacttacaaaccaaatcctctctatcctattagtatcccgtcaacccattttccccacaaagaagaaactgacaacctaaaagggtatcaacgtagtctaagtgaattgccaaataacttgttctttgtggaagccatcgcaatttacaaagcctttccgcacatgttgtccccttcagtcttcacaacagaaatgtgaagaggcattagaagcatctgacaggtgagaaatggaagttcaaagagattaagtgaaagagattgcatggcagagctgaggttcgagacagcactgctaattgcagaagccagcaagtgtgagcagcaagggaccccagaaaagtttaactgcctaaaactcaggagctggggagcgaacactacaccctgaacttaaccctttgagagcttcaaattcaagaatgttctgctgtgctgttgaggctgctgtgaaatcatctgaagtacttgataatctctccatacaccctcacggtccctaagtgctatttcgattgaatttaaaatctctgccccctccccccaggctgggacgaagactcggtcagtaaagtgttcacgttgcaaatttgaggacctgtggttgatcctcagaaactgtatagacaagagtagacgtacagtagtaatctcagctctggagaagcacagatggaaggatgcctaaggctcgcggaccaagcaaccagcctagcctacttgctgagcccagaaagagaccctgtctctagaggacaaggttgccagcagctgaggaaccacagaaggggttgtccttcgacctccacatgcctgcacacactaatatgtatgcacacataaatattcatacataggcacaaacggatatgcacatgtgcataaacacacacacacatacacacacacacacacacacacacacacacagccacatacacattcaactcttctattgtttcctgtttctctgcacagcagagaatcctgagtagtgctacagtaaatctcccattaattaaaaaaaaaaaaaaaaaaaaagattcccagcttctctgcaataatttggagtttacaaagattcattcacattaccccatttgttttaatgtcagcccataaaacaaggttacacatgctagaagtaatacctaggaggctcaaaaagctataaatggctggcctggaactggccacagtgctttaattttgtccacctgcctgtgcaaatggggcagttacttgatttgttaaatatttgccttcatggcttctctactccaggtattcagtcaggaatatcaagtggtttcgtatcgtatttgtaacatgaattaattcagtcatgtgacaaaaatctacatttaaaatggaagcttttttccatttgttcatgaacacaagaggcacttcgctggaaaacatgttatatctgggccaataatctgatctgtaggaaataaatagcagaaaatgcaggcagcagcttgtagcacaaatattggtatcagcaccaaaacaaataaaaacgtttgcccaggttaatacagtgccactagactatcctggaatatttaagctcgagaaatgaaattagatgtcaggatttctgagggggaaaagagtgtctcaattcaagtatgttcccctctaggagttagagtaggactgctgcaagtctctaaaagcctgtggactctaactcacaattttcctgcttccttgagctctatgctttcgttatttcctcctgaaaatcatgtaaccagtcacctgtaatcttatgttatgttcatggctatagataaagaagcagtatttgcaatacagatgaaaacttgggctgaaaagttgccttgggtcctaagagacactctgggaaactgtgtttatgccccagttcgtaaatgcattctgcactatttatgggcaccatttacgtgcgctttccctgtgtgcaatgcccatttctaaatcagttttcccacctgaaggtgttacctctccatcgacctttttctcttccatgaatgtagggcggctgagttgccagtgttcgctgcaaaatcaaagagaactgaatttgtgcattggttgtgttgtgctcggctgttaaacttgagctgactctgacttttctgttctgattgtctgtccaatggacatggtggaaatgatatgtttccatcatgcccaaactccaaacacgggaattttgagttgaaagacgttacataagctgctaaccagagactaatgagatagttagccttagtgttttgtttcagtctgaaagtgaaaatgaatggatttttatggtccattttacatagtatggcctgtgtctgaggtttaagtgcaaattcaccctctatgaacttaagcacagtaggtttgcataaccattcctgttcaagtcattcaacaactgttgcaaaagcctttggccaacttttcaactaacaagtattaaaataatatttctcaatcacttacgtctacactgtcagtacaataatatatttaaatttcacacagccattttttggggttttttttgtatacttcaaaaacttaacatgatcattatgaccttagatgtatataacaatttttaagatgatataaacatgacagaaatgaaaattatgatgtcaatttgactgtaaaaattagtggtttataattcaaggtatgtgtttaaaagacctgtgcatttattaatataaaaaaaacacatggaatgtgtgaccaagaaaaacattacaagaacatagtatatagaatatagtatattcctgttgatgtaaaacattggttcacaaagatatgtcagtgctcacatgtgaggactaactagcagatgtgcacacatccttaagtagaaataaatgttttcagcaagatgatcatgaagaaaagacagccctatctagcactggcagcaaagcagaaagacatccctgaactcaaatgtcctcccattgtcagtggtcctcccgaattcaccctcagcacctccacccctgctctgtcacttatcatgctaggaggagcagtacaagtgaaaattaaatgtacggacctggaacaatagacacgtaccaatgccttgaaaaagtttaagacaattgttttctataaaattcacactgtttaaaaacatgctgagagcaccctgaatctttcctgaatgtgttgactagaccccaacatgggtgcccacctcaaccagtgcattagaaatacatccctcgggctggtgagatggctcagtgggtaagaacacctgactgctcttctgaaggttcagagttcaaatcccagcaaccacatggagctgtaacgagatctggctccctcttctggtctgaagacagctatagtgtacttacatataataaataaatgaatctttaaaaaaaatgcatccctcatagcttggtgcttcgaccatatgcaaacataaccactccaaggtgtttttaaatacatgcaaaactaaatctctcatagaaccaatggtttcaaatactgtgtcatggagatagcttgtttacaccacttgctcatgtaaacacacacataggcaaccggcacacacactaagtctgaaatcaaatatgatcaagaggaggtaaacaccaggcatagaaaatgtgaggaaacagcactgaattggagaaagggatgatgaaattacctatatgctgtagggaggactaagttgtctataacactgtctctgagccctggggtgcagagctgggaccagaatgataggccttgtgaaacactgaactaagaggacagtacgaaatgttcttggagattggtaactggggcaggattgcaactatctttatgaaaggcaggcagggctatcagacttgtagactctgaaatgtaaaccctgaactcactaagagttaactcaccttagccaaactttcaatgtctctgcactgatttgcagtcacgtagagggcttccctcagctaactaattatatagatgatatggaagtcccagtggaagtgaggctactctctcatttgtctcatgagtctgtagctgttcaaggcttgaagctaaaggagtctggttacaagcatctaggcaataggaactctgccttcaaatcagtgtaaatagagcatgcccaaggctagaacccctcccccctgtcagaacttttgatagtctgtgaccttcctctgtctgggtttatgctaggcctcatccaggaaacttattctcctagacacacatggagcaatcctgggggtctctagaagcagctactcaccatctccaagaaaactgcacattgtagaactcaagctgtacagaggacaggtccttctgcattatgagacctccaaaggttttacacaaagctactactaaaattgttatttataaaactaacaaaccgaaagaatttgactattaacaaatgaaagtgaataggcttagaaagaaagttaatatgtgggggttttgtaaaacaatccttagcatttttgttaacaccattttcatctgtgaatgtgaacttgctactacttagtcacttaaaacatagaaaagaatgtcaaatattatcccacaaatactgagatgagggactctgcacagggctcttactgcatcattaatatctgatggagttacaaaacatttctagaaatatttcataggcaaattattaaaaatcccctactgttatacttttcttaacaattacattttaagaagtccaaagctatgtatcatatgttaggaacattccatttaagtgacgactgataataatcttcattttcttctccagacgtgaaatactccagaaagatcacactattagtttaaaccagcagcaagtactttgtgctttgtaggggagggagtgcccttccaggttcatggcggcagcttgaccatccctgtgcactgcatctattctatagtctagtaccactgggttcattccaggtttaactgaagagcccaaggaaatccaaatgaactgaagtaacctttggacaaattctactcgtgcccccacacctctgtccccttacacattccacactattgcacatgtttgcttgatattggttacttcttttaatgaactatatctgtggagacatgagggcaaccaacaggcagagtatagaaacttattaacaaggtacttaaaataagttgtcacttctcttctacagaaagagccatcaatagttatcaaggcatcccataaacaatgctagaaaaccattgactcttacccatgaatgtgaaataaaagaattgtattctgggactgaaactgtgttttctgcaacattaaacacttctcagctccttacctcctccacgaattgataaatgctcaagaaaaaagctaattgtaatattgtcttaggaaactattatcttcattacaatcaggactatcatcatcatcatcatcaccgtcatcatcatcatcagtaaacatatcagtgaaatagactcactcaattcattccaaaacaaactacaaattatatgcactgtctgttgttttggactctccaagagactattctccaatgatgtggataattatatttatttcttaatttcatttgaattttagagcaaatgacttacagagtgaattttataggggaaagagcttggcatagcagaatataaactattgacttggtttcaaaaggccggtcgttctaaggctgaacactgcattttgcagctaggaactatgagaaatctggtgatatttcccattccgtttcccagaaggagacgcaatcagccagcaaaaccattgatctatcaaggttcttttcatctctctgtttcaaatatataaaatttgtttttaaaataagagttgagtcgtactagaattgttaaagtttctttaaaaatggggatctgtctcttttgaaacttacaaaaatgaaaaagtctcatcccctgaaaaggaatggggatatacttttggggatcaggctactggggagcctcatctacctaattggatctcctatctattcagtaagggttctcataacatgggtctctgttttgctcctgttcaaagttatgacatatttttgctcacattagatgttttatacaaactcagactaaatcactgaaccaaacattgcctgtgttaaagatttttttttaatgatgttctttgaggaggcagtagccaccctttcaaagcttccttttattatccaggcttcttctcattataagtttttgtaacagttggttcatagaaatagatttaaatactgctagctgaatgctattgaagcattcaacagaaatcctttagaaattgaagttgttgtgatgttcatggaacagaatgtctgaccgtgtttaatggaaacttccgtggtagaagagaagggaccttgaaactgtgtctctaacatggctggttactgctcaactgccctgtgccaactcctcaaggaaggacaccaatgtgcaatactgtgaggtggttcccagagacagatcctcattgaaataaggagcaaacactgctgagtcttacctagtgaaataaagttattggttttgcagcaaggacaatgagggtatttgtttaaaaagacaacttgagaaaatagcaaagacaacaggaaatgataaatgagccagtctctgctacagtaattactttagcgtagcaacaaatgactaactttctcaggaatgctattttccatcggagagtatacctctatccgctcttcaatgtgtacgacattgttcttgctgctggagaaaaatctctaagaaggaagagccagtaaataagttgcctgagaaaatttgtgtttttgaaatgtccatgccatcctttgggttttatctcagttttgttttccttaagagtttcatgcaatgcagaatgcatcaatggacttgagtacgtagctgtgccatcagatcacttgcctgtttccctccctgttgctaagagaaggtactcggactgaagcaacttaagggagaaagaatttaccttaggtcacagttcaaacagcctttcatgatggagaagtcaagacagcaggaacctgaagcccttggtatttactcagtcaggaaacaggggcagagtgcatactattgcccagtttgctctctccactgtgtggtacaggatcccccccatctccccagggcatggtctctttcacaattaggatgggtctcccaatagcactcaagccataaaaatcctccacaggcaagccctggggcctatctcccaggtaactctagcttatgtaaattaaactaaaattacacggagcttgcatgaaacccagtgcaacagaatgtagagagagaaaactccaaagttcaagattatccatagctacagggagtattggaagctagcctaggctctatgagactctttttcaaaagcatttaagtaatttaaaagaaaatggaaggaaatctctctgacaccggcaggtaaataataaaatctatatcttgctgattgaagtagcacattcagggaggatttgctgcaggaggtggaggcaggaggatcacgagttcaaggctagcctgcaagtgttattctctatgtaactggctggcatctgctgagatgtttttcttatgcacaacatacaatactagttttccaaagacctatatttgaaacctacttaaaaaaaaaataccccataatcttgggaagcccttgaagaattttggaaataaggatcatgctctttcatgtaatgagagtttctctgcagggattattgacacatttggatgcacatgctgctgatattagagtggctccagaatttggattaatttccagagagaagtaattctctaagttgcatagtaaaatttgatctagctctaacagtatttctactgaagattttttaattgtggattgccatttcagtctatcagaatattaattggataataaaaaaattagatggcaagtcttctgttaatcatcaacttctcttgattgtatatcaattctgaacttatactccgggtaattctgcttcctattcattggcttaagtttcattcagacttcgtctcccagagcagtgagagttgtttgtggcaaaatgtttgtactgtgaaaaagagatgaaagccaccactgtgtcaacatgcatggagtgatacacaagttgaacaaaaatatactagctgaaagcaatattactaggcagtgagaaaacaatggttagagaattttattgtaaccacatgccaagtcaaattctaaaactggagatgttaagagaatattccaaataacgcagaaccttccctcccacatttcaagatactggattttattgagagattttaacatttatgagaaacacataaaccttcctagtattttaaaagcgaaattttaaattcaaagttcgttcctttctcttagtgtctttgtagcttttctattactgtgataagacaccatgaccaaagccatttatagaagagtttattttgaacttatgtctgtgaccatcttggtgggaagcatggtggaagcgcgacagctgagagctcgcatcttaagacataactaaccacaagacagagagagggaactgtgaccagcatgggcttctgaaacctcaaagcctgcccccagcaaggcatcccaaccagtgcccccagctagggaccacaggggagccattcccattgaaccaccatacgtcataaacaaaaaataaataataatcagcctagtcactaattttcacaaaattatttcctatctccttcccagcataaaaatgagactttatcctattttaaaatgtctttagagaaaacaatcttctaagttttcttgataacctagtctttgattacaaaatgaatatactttttcatttaacatattgttcatggacaattgaattacacggatacctttgtttaaaagaaaacaaaaagaaaaagaaaacaaaacacacatcggtagcttgtctccatagcctatgttaccattacctaccataatattttcagtaaatgggctggctacctagggtttagcagagtacatctagagactattattagactttggatttaattttgagccctgaaatagcatagttcgttcactgctgcatgtgacattttaaaaacctgagcaaacagtattattcttaggaaagaaaagctctttctcactagattcagcatttagaaacaatattgaattgatttgaatcataaaattgtctctgagaacctgaaatgaatataaacattaggcagatgatctcacctcttgcttcctgccttagtcctgttttgtttcctttgagtggttcttaatattcattcaaagtgtgcatgtgtgcagatgcatcccaaagccacagtgttttcctgctcttgtcagagcccaagcccgctacactccatactgcaggcagtgcaagctctcatgccctgggtggagcccttcagtaagaagccagatctgatcaggcaccaggcacagctgtttcgtgtgtcaagaccatgagtattctttacttctgtgtctgcgcctagcaaacaaacacgatacttttagatgtataacgctctcctggtcttgcccttcaggcaggagtctcacattccatggaatgacaaaggttcacatccctttttgccctaggtggaaaacataaaagactaagatgcatcattaatcatgcagactgtctgcagcaacactgccaagaaaatgatcatcctcgtaccacccatcaatatccctgacacctgtctaagagctcaggtcatgcatatccgtctgcctttagagaagtgtcaatgtgcaaacattgcttcactatttttagggtcacgttaacattattcatcacctacctgtcagttcatccaatttgtcatgttgtgcggacctaccggtgactgttgctggccatcttttcttacgttgtggtttttagagcatgagagcagaagatgtttggaaattgtcagaagtgtgcaagacagcaaccagagtttcccccaaggaattactatggctcatgtttaagaaaaaaaaaaaaagcagacattcgaggtccctgtggccttccaaaatttctgcttctgtctgatttcttgtccaatgagttgtatttttaatcaattttattataaagctcacagcatgattccaggaggttaaatcacggctcacaaatgaaacaaaccttcagaaattaggaggtcaaagattgctgtcctgattaaaaacaaaacaaaacaaaaacaaaaaaaaaaaaaaaaaaaaaaaaccaagctgtcagttctgaatacctagaaacatactatacacaagttaaaattttaagtacaaaggctgataaaaattctgatgctgcaccaggagctcatgatggtttgtctcaactgtcactcagcacaactgccacagctcctgaaacagcttagcaaatacattccgatctctgagcagggaaggcatttcaccataggtgggaaaattccagaactaggaattaacacatctgcgcttcgagccactgccctgcagtgatgctcaggggaactgtgggagctcttgccttggatgtttggctccacgagtcttagttttttttttttatcagcaaagtgtagatatcaaaagatctccaatatttgtttcaggagtctatcttcctattgttatgtaaattcgtgacagatataaagccacagaatgaattgttctgtctttaaataattgtgaccttctctgagatgtgcatgaagatgctggaatcaggaaagtaattggaacaaacagccctgttgctggcctgagctcaccaaagtgataagctcaaagcctggaagagtaccagctcttttcagtcactaccaagtggagtgagtttagctgtgacacccatgaagtaagctggctattttgtagctgttgatgtctaggactaggaagcaacagatataacaacatgacccaagagctacaaaatctgctcatatggaagataaatgccttaaagaaagtataactttgttagctatttgtattcatgagaacattagagaatgttttaaaccagttctagcaattgaacccaggtctatgtgtgtctacaatttagctacacctctgggccctcattagtgagaatcttatgaggattgttcagtttatcactaagactgaaaatatttgctttgcctttataaaaataagaatgtccaggaagagatgatgatgcctaagcctcttgttaccttcaaattcagaatctcatacaacactaataaatacttatactaaatcataattatgcagatggtttctctgacatataaaaaaataaatcattaaagaaatagggggtttgaagccccataggaggaacaacaatatgaactaactagtacccccagagctcccagggactaaaccaccaaccaaagaatacacatggtgggactcacggctaccgctgcatatgtagcagaggatggcctagttggtcatcaatggaaggagaggcccttagtcctgtgaaggctcaatgccccagtgtaggggaatgccagggccaggaagtgggagtgagtggattggtaagggggaggaggggtggataggaggtttttggaggtgaaactaggaaaggggataacatttgaaatgtaaataaagaaaatacctaattaaaaaaatctttaaaaaagatagaataacaggaattagtatttactctgcatttacattatattatgatctgtggacagcatgctgccttgctccttctgagtctaccttcagagtccacagtccacaaaagtgtcttaggaatgagcaagtgcagctcagcctgatgcagcggaactgaggagacctgtggagtaacgtggcccacaataagggcggccaaaatgttgtcttgctttttggtttggtttggtttggttttggtttggggttttgtcagtaccaggtttacctgacagagaagagaaaagagcattgtgaaggtggggggcggggcttgaaagccaaggaaggttgatgaactagagggttccaagactggcacggggtttgatgcctctgtgatatggcatggaggagagggcaaaataaaggtaagcagaaatggtggtttgtaggtgagccaagcctccatcattattcgtaataaatgtgtaaatatattctttggtagggggctataatttaaaaaaataaggaaaaccaaccgggcatagggaagaaaggaacacaaggcaaggcagatgaagaaagcctggtagaataaagaagattggctgtgttgttgttgataacagagaagaaaatgtattttaggtggacttaggatgtatgtttaccagatttgctgtctagatgtgaatgcctgtatgtggacaaaatagtgaatcacatctgatgtgttcctttggatgcatcaacacagagatggacctgagggtctgcaaggagaagaaaggaaaatgatgatgtggtgaccctccaagggaggctgaagctgaaggattgataaatgccttaaagaaattcataaggaggataaatgccttaaagagattgtaactttgttagctatttgtgctaatgagaacattagagaatgttttaaacgagttctagcaaaggtggccccagaaaaataaacagggacctgtgggtggtaaagaagagtcctggaagctaatagaggtgggatcctcagaagctcctgtcattggcttctcccctgtgtcctgtttcatgtttttgtctctagaataaaataagtgctcatttcattttaagtgttaggcctaaaaatatcccttttgttctaaagcttgcttttatgtacaattatgtctataacttactatctgtcgtggctgttctctgtgtgtggagccagagccccccccccccctttgccttcacactgttgcagtgagcctgctgagatctcccagtagcctgtgcctgcattccagacattctgcaaatggcatgctttagttttcccagtctctttaatgtgaacagaattttgtttgtgcatttgtggtttaccttttattccttgtcttctttagttatcattcaaagtccatgagggcaggaaagccatcctgttccctattataaatgtggcacctagaaaagcgcctgatgcatggtcagcaccttacaactattccatcaagaccaggggtcattgctctagaagcagaagtcctcatataaaagtaacctcctcttgttttcctcttatgacatttttacctgtattaataaaatttcaaaaattttttgtgaaaagctacacaaacagaagatgtataggtgtgtgtatcataaatttatagatacttttttttaactcctcaaaaaagaaaaagaaaaaaactaatggattccagtttgggagtttaatttctcatctcttctggacatttaaaaacactttaagaacaaacttttatagggaatttaattctgaacattgctttggaagtaataggaaagactgtttactgaaaggggaagaaagagaccttcatatgcaaatgtctggcatttgaaaatgtcatatagctacatctacatataaataagatgctctctgaattccagggaagggagactttgtatagcattagccaatttctatatcacagtaaagtgaaactaataaagcagcaatgggtcaagaagtgggggagagagcaaatctccactacctctaacagcagcagcactccgggtcaaagaccaagcagacagaatccgagccctgatgaaatcaaatcctacgcgcttgaaggataatggagagcagccagctagaagaaaagggacacagatcaggtcttgacaactccctatcacgtacttgctctccttctaaatattgacatggaaaccaaagtcctctgagatcttttctctccaggctgagagatgtttttcttaacatgaagttctaaaggttgaacaacaaacaaaacaaacaacatcaaaaacaaataaacaaacaaacaaaattccactttgacatctttccaatttcatatgtattccactgccttctaatatagtgctccctgactatagtggagtcacagggggaaatgattaataacataatttatgttacttttactgaccatttatttcatggagtccttgtagaacttgtaccagcgagaactgactggagtctatcagccagagcctgtaccaaaatttaattttaggtactaagataagtagaccaaagccaaccctggctcctacacaaggtaatttatacaggagctggtgctgagagaactagcctcgagaaggataactgaaggcaaatgcttgaattttagggtagaaatctattttagtaagcttaagttagcagcaatagggaagaaaagagaaaaatccaattgtcaaagaaaaccaacaaatgagggttgtcctaaaaatggatcagtataatcgttaccttcctgttgaatatagaaaactgtttggcaacttactagtgtttctctttgaaataaccattcaataaaaaagttattatcaccatggaaaatattttaaatgtagaaccagaaagttgaagaacctcatctggggacatcttctgttggagaagttgagaatatgtacaaatagtgttctctctagctagagagaagtctcattggcccctaccactcctgcctgcattggggcagaaagagtaacaggaaaagagagaaatgcacattggatacatctgaaaatacacagtcccttgtggcagatattaaaggagccaaagcaagtccctaatgaggattaaaaatatcatatcaaagaacatgtttcaaaaactaaaaaaggaaaaagaagtggagaaaaatttgttgactttctgctaaaatgtgctgacatgtggggatatttatgtttttctgaacatctggtgcatattagtatgtttttattcacaatcctcaattattaataaaaaaggaaagctgaataattaggacacactgccacaataaatgaatatcatgcatgtctcttcccactgcatagactctcaccataccattaaaaaacatagttatttttaagtagaagaatcagtatattatcttattataacaaatttctatcagaatagaccatattgagtcagcaacacatgaatctaagaggttggattatatttcaaatcatgatcattattattaataatgatccacattatacttttaataatggctaaagtttgaagaacaacctaaacttgatatatacttgctttgccaagatggaattctatttctttaataagactttatggagcagagaagattttattagagagaatggcaccatcacttttggctcctttgtagcctgtcaaattgaagttatcactatctactttataaattttggttaaccttcatttcctattaaggattgcatcagctacttgtggctattttaagaacccactactgaatataactgagtcctttccatcaattgcaggtagccagcagtgacacatagtccaagagtggtgaaggctaggacaagtctggcagtagacagcaggttgtccataaatgatcacagaactctggtagcagaccactttattagctcttctttccgggcactcacaccacacaccctgccttcatctctttgtctgtgtgcagagatatagctaattaccctgagccctgcttaatctcacatgatttcttatagattcgtacactattctaacatcaaataaccctgcttctcatttggcaaactcttgttccagtttgcatgtcatctttgccccatgaaggatgatgtgttgaacagacacatttacttgccaagtgctgtatgctatgccaacgtgtaccaatgcatacctacatctaaaatctcactcatttaaaacagctataaagagctgagtactatggataagaacttgcctatagtcacagtgctgagagaaaaagatgagaaggccaagcaaactccccaaacattttcaggaggtactgctaatctggagggtagcataaagggtttcattgcagcatgttcatacatttgcatcgtagtctttttcgattactctgttcatgcactgccttccctgtccccctgctcactgtgtctggtttctctcctccctttctactttcacatcgcttgtattgcattacccccatcccccatagtacttcctgctacctgcccagttgctgtttggatcctcgaatgaaacacatgcacacgcacatgcaaacacacacacacacacacacacacacacacacacacatacattagcttattttgaaattcctcccttgtctagcatgcttttctctccagtactcctgactcaacacctcctaaatctacttttaactttgctgccctattaccttctgtgaagcccattgtgttttgctactcaagacacttcttggcagcccttcctggggcagcttccctttcctcctaggtttcacatgatcttccctctgcagccctaaatctgatctctctctctctctctctctctctctctctctctctctctctctctctctctctgcaattatccttctcctcctctctgcatcctagcctgtgcaactctacgggccctacctcatctctctttgccctactattggctgctggcttcttttttgattgagcacaaaccaatcggggacaagaacctttagcatttggacacacagattccctattaaatcaaaacattagaaccaatctcaaataatccactcttcctcctgctccactaaaacttatgccttctttctcataacattcacttctagttttctccttttccccatgtcataagctcatatttatgcatacatgcacatatatataattttaaatctcggttccatgtataagagaagccatgtactattggtttattacacttaacatggtgacttctagttccacccattttgttcacgtgtagttgtcttttttgattgcatgaaatttcattatgcatatagaccactacatctgttgatagatatctctgcaggtatttttcctgatgttgagaatcttgcaataggtttctgctttttaacattcgtaagctgaggccttctgttcctcaccttcacctcagaaacgcagtaagagtccttctatgaccaacatgggcttcctgttttcattctagagatgacaaaacagctacaaaggtactcatgaatttcctcatctcctactacaaataaagagggacacgggcttctgaactcagaacaggagattataatttcattcacaagaaaaacttctctcagggttgcaagacttgactatctattagcacattctcctactcacaaagtgtatcattgcatattaatagactagagaaaacattccttatgtataaaatttcctagccagtgctacaaaatactcagacagttaaatataagattgtacataaggctcttccagcttaaactatgctcttaatttctttggaacactatagcctaaaagatgatgaagggccttcatgggtccagcctgatgtggtagaaagtcatgtggtatatgagactccatacagctgttcctgtgttaggcaaacctcatcttctctgtataatactaatcatctctgtccattgttccaaactgcagacaatgggctctacatcaatattattagcctaaaagtgctctggaaattcaaaacatggcagaaattctaactttccaatgccactagccacacttggactttccaaatacaacatctatttcttctcttccactatcctcctttctcattctcttccttgctctccatctccctcttgacacatcagcagaagaaactctgtacaaggctgtgaggggaacaggcaaaggtctgaatttttaaaagttgaggcacaatgctgagttttttgattataagaaattcttaatgaataatgaaaatctctggatctactaaatctaaacaaataagaataaaaaacttaaagtcaaagagttcaccattacttttcaggtcaacaaaaattacttgaaactcattttttagttagtatatatatttcaaggtaaaagcaggtttattatagaaatctaaacctcatagatttctataataaacctctgatgaatctctttctaggctttttatatttttcacatactatttgtgtacatattcatttctgtacatatatgtagatatgtatatgtgtttctatgtagtgcatataggtatgtgtatatgcatatgtagatgggtatatgtgtatatttatatgtttatgtatgtgtgtatgcatgtacacttgagtgcatgtgtgatgtatgtatgtgtatatgtgtatgcatattcataggtaagcatacctgtgaatgtatgtactggaactgggatccaacttgagtgccattgtattagttagggttttactgctgtgaacagacaacatgaccaaggcaagtctcataaaaaaaaaaaaaaaacatttaattggggctggcttacaggttcagaggttcagtccattatcatcaaggtgggagcatggcagtatccaggcaggcatggctcaggaggagctgagagttctatgtcttcatccaaaggctgctagaggaagactgacttccaggcaactagtgtgaggatcttatgcccacacccacagtgacacacccattccaaccaggtcacacctattccaacaaggccacacctccagatggtgcgactccctggtctaaggatatacaaacaatcacagccatcaaatcttatatttttttctggttgaataatattttatccttctgttacactgaaatttagtattgttattaaatgttagataattttacttttaggtgatgtatttaatgttagtaataactctgcctacacttgaggcttttaattcacagacttcaacagtgtgtagcatattctgtcctaataatgacatcttaagtgctgtatcttctctactaaacactgagcagataaagtctgttgtggctttctaacagccgcagttcttccttgacaagtgtaaaagctgatcacagtgagcctgccacctcagttccctagaagcagatctcagtcatggcctgaggtaaagcccctgaaaaccggaatgggaaaggcagggtagggggaaggaagggggaactaaacaatgtgtacatagtctaaaataaacaaatcctaaaagtgtgtgtgtatatatatatatacacttttagaatatatatataatgttttgacagttttctttaggctgtaaaatttgagttctttcttttgttcttttactatctatgtatttttcctattgtcacctcaatgtgaattgcttttataatgaaaaatatccaatatgctttattttttaagaaaaatatagaactaagcaatttagctctctcgggaaaccaaattcttcatattgaatggtacagtttctattagccagtgaaacacctatggttatgactctacctgcggattcaagtggagtagtaaggcaatctcaaggatctctccaggcaaaggaatacttctgtctcaattatctgaaccttcagacaaaattgttttctgggctgaaattatccacatgactgcttctttcatttttccccctaactctgcatgttcaactctaagacaatccattactgttgatactttaagagaaaaccccagattaaactgagaacacaagaaaagatggatgtgagggctgataactctgttgacaatcttgcatctgaatctcctttaaagtggagtttgagatttacacacacatggcatctgcagctagttactgcttttaacatgcctggccataggcactgacttcatatgtctgccacctccctccaacttatcaaaggtatgaaaagtgtgggcatatgtgagggctgtgtgtgcatctgtgtgtgtgtgtgtgtgtgtgtgtgtgtgtgtgtgtgtgtagtttatagagtagcatatgtatatttatatgtatatttatgtgtgaaaatatttatatgctttatacattaactatcatgtgaaatgctgcagtctttgtataagaatgacactttaaaagcattaaattatcataaaataacaatattacttaataatcttttgaccaaaacatgacctgtgttatataacacaaactgaaggaattcaacagatttagtttccttaaagaatctcgttttcttgtgttaagatttacaaaaacacagagaagtgctttgcttaaaatcattcttcagtgatatttcttcatagtctcaattctcatcatttcatgtttctgactgtgacttttaaacttgcttctccaaatgtcctatagataattaccaatgccctttgtccatttcatatatcatatatctctagacaatttctttaatattaattagtattagatattccatcccctaatatttttcgactaaaaaaaataaattctttccagtttatgcaattctattgcatacatactgaaccataaccataaaatttttagtgttttctcaaaaatcacaaggcattttgagatatttgtattgaagctaaaatatttctcctcaaagtttacatgatacaaaatggaattagttagctatttaaggcaaattttcatcttcatttgtttctctatttttttttattttgagatagggtctctatggtgttttgaatgaaaaaataaaataaaagccctcttaggctcatatatttgaatgcttggcccctagttggtaaaactgtttgggaaggtgtatggctttgttggaggatgtatgtcactgagggcaagctttgatgttttgaaagcccgtgccattccaggcagctctctccctgcctcctgcctgtaggtcagatgtgagttcacagcttctgctcaagtgtcatgcctacctgctgccatgttccccaccatgatgctctgatcctctgaattcgtgagccctaaattaagtactttcttttatataagttaccttggtcgtggcattttgtcacagcaatagaacagtaaccagggcagtctccctctctagcatgtactggtcacagactaatgattctcttgccttaatatccaaagcactcgaatcataagtgttaccacctcctaaagctgtttctttcatttacaacacatgaatgggtcatgcacaatcttcatctaagatatattcataatagagctatttttctcccttcctacccacgtccgagacttagacaatgtcgatcacctaagctgtaattctgatttcctgtttgtctgctgttctctctgagtcccctcattaattcattttctatgctggtaagatctgctagatacttccccactgcccttgaaatccaaacaatgttcctcctcctgatatgtagatatctgatcagagaggatcttggtcgacctcttcatcttccttttgtatccttctcctgttcctatctctccttctacccctccttcccctgactttctctgctctgacagagtaccttgtttctttgccccactttctctatcaggggcactcccttgactctttagctggccagctcttcagagctgttccttatgacacctgaccccacctgactgaaatagatttctaggcccactgttacgtatctgaacatgctgggctacccctctgacatttcaacctggcatattgagtttgggggggttgtttgtttgtttgttttattcatttatttattttgtctgttacctgtctcactgtcgtctcgctgtctaatatgtatgcacttcaggaaagaaactctttgttacttactactcataccttatgtttgtagcattagctacataagaaggaaataagtcaacattttaagagaatcaggtagatgaattatatgagtaagggtgaagttgttgtaaattaagacacttcatttctcacttctctaagatccaaaaagttaaatggtcaaatactaagagccaaaagtcataggttgatattaacaatatcaattaaagcataagtagggctttgggtttttttgttttgttttgtttggtttggtttggtttggttttttggcgtttttttggtttttcgagacaggtttttctctgtatagccctggctgtcctggaactcactttgtagaccaggctggcctcaaactcagaaatccacctgcctctgcctcccaagtgctggggttaaagatgtgtgccaccacgcccagttaagtagggtttgtttttttttaattatttttttctatatactgtttctaaacatattcaccttgtgtttctattcctaaataaatggttgcctggaagttgcaactgtaatgtcagtttttctatttcaatagtccaaacgtatatttgactctacaaattcaaaattgcacatgttttataacgtctattgattccttgagtggctcaccgtgtactagaagactgtaaattatatcctgagtatggggtagacctatgaaagggtaaactagcattgagatcacaaagtagcttttagtgacaacttatttcaagctctaaatagtgtctaggtagaaagaaattattcagaagtacacaacacccttaactatttctagagttatccatctggagttaactagttaagtcatcattggctataaaagtcagaaacaaaccaattgttcaaaactggaaactaaaggagtccctggctatttaaaatacttggtgattatctgcaattaactgtgtgttttttgtctatacatatataaatatatataaatatatacatataaatatatacatataaatatatatatatgtatataatatttaactgagagataatgtttcaaataccaggttatctcaatttgaaattctcttgatcaaatagaagaacaaacatttcatttttaaatgttttaaaatcaaataacagaatattacatgttgaacttttcttaatgaagtagagaacatttcaagttttcttaatggaatacttaaattcttcttaagcaagatatacccaaaagaggtcttgaattttcttaattagtctgagttccgtgtaaaacatcagcttttgagcatccagaaaatatagggctaagctgaacaggcatgccctacatgtgacctagaatccatttgctgaaaaggtcgttgatgtcagtgagcttcttgatcatttatttgaggcaacaaaggtaaaatgtagaaccatttgttctgtggcagagtgaataataatcaatggtcttttttatgaaaaataaataaataaataataagcaattcaaaaaagtttccttggggtctttactgctttactggagctattagaattgataccttcaagacataattttgcaactcaaatgagacgaacaaatactttagcataagcttaaactaagactatcagatacattaaaaaatatctatggataaccaggattctattaagaactatgctgggaaagtagacatgaactaatactctccaggtcacttggcaactggaacattttcattgtctctatgtgtgtattgaaaagtgacttcatcaatgcaagagtttattgttaacaactgtattagtttgctaaggctccacaataaactactacaaacagatgatctaacagaaatgtattcatcacccagtcccaaatgcccaaaattcaaaagtcaaaaatgtataatgggtaacttcaacaaagatctcaaagacagcatctttctttgcctcttccaggttgatatttcctcttgtactagttcataggccaacttctgccgccatcatcatgtgacctactttgagggaacatgctgtgatctagtatagagatcaaaaaataaatgttctttaaagtgtcattaatcagtggaaagatataagatttaaattgaattgtcaaaggttgtgttcaatgatactatgtttctatagcaggttaaccttttagagggacaagtagaaatttatgatggactcttgtagcattataactttagtttagaaagtaatacctccttcaacaacattcttatgccaaacacaaatatgttggattaactggtaagtagtaagagaaatgaaatcaaaacaatataactttccatacattaaactgttcaagagctatactgttcaaaagctattaacaaaatttcccttattttgtcttagagcctattccatatgtttaaaaaaaaacaattttatctagactcctagtgtgaaatggcaaactcgtctttaaaaatactcattgcacaatcagctacatatccttcttaaattgttctgccttatccttgactgcacaagtgtattatcttcttgtcctttcagtgaggaacacttacattaatttagtcacataccatcatatggcaatactccagacttgtaaatgaaactaaatccatgctataaattctcagactgccctttctgggccatgacatcatttagaagaaatatgcagacccatcatttgcttacactagcttctcaattcatttatagctgtccttctttgtcgtttacaattagcagaacagttttgcccttcatgttttttgtatttcactgaagaagactgcagtgtatagcaaatatagcattaacctgtaagcacctactcctgcttcaatgactacaggcacatcattgagcaaaatctttctcccccatattttgcttttccaccaagatagggattggaatcttcagaagaaaatcacatcactgaagtgcagctggttcttagagacagatatctgaaagcacgaatgttttcaaagcctctttcctccatcagggcacagatggttggttgccaaatatggcttttatccctttaatacttactcattcatgttaaatattgagcacccactttgtgtcagtccatgccctaaaccactgagatagcccactgaacaatacaattagactcagaaggatctaatgcaaagctgtattgtgtgttctaatgtataacagatgtgctaatgcattggcgctcaggatggctcaagtgactacagccccaaggccagttggtatctccttgtaccaataactcaatattatgttttatgtatgtcatggtgaaaaacatttagagatgccacggctagtacagtgtcgccagagtgtagactgatggatgggctcgtcgctgctcctcaaaaaaagagggagtgccagctttggtagactggggcctatgctctaactgtttaggaggctgaggcaggagaatttcaaactctgggcacgtcgggattttagaatctgtttaaggtaacttttcgtcgagtgcttcaagataaaatgtaaaaagaggctcaggggtgacattcaaagaggtcctaaattcaattcccagttgtaggagggtagagagaagtagaggggaaagagggggaagaaggaagagaaataaagggaaaaggaaaggagagcctgcataagccagtgagtaggaattctgcataaggcatgacttttcttagcatttcacagtgtaaactagctgtttgtctcagcctaacctctcctagttaacacatggccgcaaatgataactgctctccagtttattttcctgtctgcttttgttcctgtcctcattgccatgtgtggctttatcttttccacagactaactaaacttaagtagctatcagccacgttccttccctgcccattggaaattgaagctctcctaagcattggtatgatctgtaccccttctcagctgtgttcctcattcctattcccaaagggatgctctattagctttcacacggggggtagggggaggtgtcttgttgagctttgctagttaccaaccagagtccttaaagaagtctagactgacgggatctggaaggctttcacagacatcttcacttgttagaggcacacaacatattctttgagtgttggcttctagagacattttaaattgagttgttctggctgttctcctatgatgaaaagggactggcaagctgacagcccctgagggattcttgtgacaaggaagggtgaatgtagggagagaagcagagggtaaacctcatcttgcatgttcacagcccatgactaatagtgactctccatagctcaggactccaagagccaacactgaggtgggacctagaaggtaatcggtatggggtctgacaatccaaaacaatgacgacataggagtggaaacagctgggtaagggcagttgtcttgtcagtttgagtgatagaatcacctagaatatttttttcaataatccagtccccttaatggtgatctgattgggccagaaattaaaccagaaaattccattcttaccaccctaacacaggtagcattgccttaagagagaattatagtttggtatttatctcattaaattttgtatacataaaagaaaatcatgaagttgcattcatacaaagtacatggacagacacacagttgtgtgtgtgcgtnnnnnnnnnnnnnnnnnnnnnnnnnnnnnnnnnnnnnnnnnnnnnnnnnnnnnnnnnnnnnnnnnnnnnnnnnnnnnnnnnnnnnnnnnnnnaggtatttgagcaaccaaagcatcatctaagattctgtgacagccagatactaaggtatgacccacttacctgcattatataatatacacaatcataactgtttacaatttcttgtttaaacagtttattagtatttagaattgagcatcaaacttgaatattccattcaaataatgctaaatggtcataatcattagaagttattttaccactgtgtaagtttgaattgttaatccactttggctcctggtgggttttcctcacattgcacctgcccaagaactctggattcacaaatgaaagacacacacacacacagcttagtttttatatgccttgacttgctcaatggctgggcacttctaaacctccctgcggataatacatactcccctccagtattcctaacttaacaccttctaaatctctattttatctttgctgccctgttaccttttgggcagcatcccctaagggccactttccctttccgtcgacatagctggatgatttctctcctgcagcttttaaatctgacctctctacctccaagtcatggggattcctctctctcctcctctgtcccttgcccatgcaatctaaaagttctctctccatctccctgcccagccattggctgtacagcaattatttattaccagttaaagccagctggggcagggaccctcagtgtctgaaagtgcgacttttgggggccgaattaagacaaagcattagaaccattttccaacaccactaaagttataagcattttagttcctttcggctttgttttttgccaaaaggtcagctgtgaaacagttcccacagatacatgttactcccaaaatattctctcaaagtgcttttgcggctcgactcatgaaagcttactgaagagtaaaagctatacctttgtttcttagttgaaggaataataaaagctctccagttcatgaagagttcctgtaaaaaggctagctgattgctagcctcagtcactgccattattaccaagtctgtcagcactaactgttttggtgtggctacaaatgagaataagtgaatgactgtgtgccgaaataggcaaggaaagcaaagcctggcttctattttgaatgtacatgcctggcttttgctttgtttcattaacagaaatgtatttacttcttgtcactaaaacatcacccttttgctggacaatactatcaacacaaaaaccttggctctaattctaagaggaataagagatagtttactctggagctatttgagtgacccaggaacacaggtttaggttaccccaaattcaatgcttcgatatggaagcaatttcatgaagcttttatagttgtacagaacaaagaaagccacaaatcaaggcaaatttaaaatacattggagagtacatcagaggagcagatacagcaagacagggaggctttcctatgggcctaagatgctacctgatgggattcttagatttggattggtaaagaccagcgctctgctactttactagattctaaaggtttttgcttgtttgtcataagatgtggacaagggatgtatggggtgctagaactagcccaagaaagggtagctaaaactttgaaccagcaacagtccaatctctctacagtactgattgtaattatctaatcagttacttcagattttttttcaggagttttcatccacaataccacaggcacagtgtgactggcacaaaattttcaatgtagttttgtgatatggcttacacatcaatgtcagttctcaatttctcaattgttaaataaaggtggttataaatcattcactttagaaccactatccatgctttacagactcttgtgtgacaatgtaatccttggatgaactgtctctttctctctctctctctctctctctctctctctctctctctctctcgtgtgcatgtttgtctgtctcagaattttttaagatgatgaagataagtcttaggaaaggatttataaaaattagttcaaaagcaggagcctataaaatatactgccaaggaacaacagcatacacacccatacatatacacatgtacacagacacacgagcacacacatgtacacacaccactcaaatattaaagtgctactaaggaggccagcaccaaacagggcttcagaaagaagttagtagtcaactgtatcaaatattccagaaaatgtgaacaactggatgtgaatagattgacaatcaaagccagtactgctctgcctgcccactgcagtgtccctgagagcagctggcaaaaggagtcaagttaggaagtgaagaaagagcataggcattgctgtggagagatgtggattaagaaaaactgcagttttattttcacagtgtcattctatatacttaactgctgatagagcagagaagtgaagacacagaagagcaagacaactttgatagaatccttgagaagacacagggatgggagtcatgagggacctccactaaagccaatggaataaagaagagaataggttgtcagagtgaaacaaagtatctagagtttgcagacagaaaagaaataaaaggagacagggtcagatgttctcctgtgttacccagtccttaaccagttggtctacatgtgatgctggaataagctctgataccatagcctccattgactatctgctatgtaaagtcctgaaaatgtctttggtgtccaggactatacaaaatctatcagtcttccttgaggggctcttacaaggaacatatttttactgtattatgtattaaaacgatgatggtcttattatggattcccaagtaattgtacatttatctattatcatctttatcttaacaattattcctgactgtgtgaagaaaacaataaggtaaacccactgagggacaataaaaaaatcacattttatatatagcatattatgtatagcacgtagcagtgctagacacagcagtgacatgagaaatattaatatgccatattacacagaaagattaaagctgtttagctttgtggtttggattttgctcttgtgttcaagtatacctgcgatacctgtactgttgaagccttcactgtcactgcgtcctaggaaatgctccagtctccatcccatcactctctgtgggatcttaacttcaggtcacagggaagaacaactacattacctgataatgtttatccatttcctcatgcacagcctaaggacaagggaatggctggacactcagctcaggcaggtaaaaatagatgggcttcaccccattgcttctttctgatgtcgtttagaatcattttcagaatggttaccaaaaaaaaaaaaaaaaagtctcactgagaaagggtggccagatctaagcatataaatttgaccagaaatgcatagatttccttgaacataaacgaaatggagatattcttgtcatgaaataccttctcgtgagcttttctttctctatagtttctagtaagctttgacttttgaagagaagattcgctgcagaaagagatagactagcagcccagggggtggggctaaagcaaacaagtcccataatatcaaggcaactctacctctagatgcccaggagactaataaaccacagatccctgcttcttcccaaggacttatcttgaccaaactgttgtcaaagccatgtgaagttccataaaaacgctgtgtttaaaaggtcatcaagcaaatcctctcaacctctgagtaacccacttgctgaaagatcagctcttgacagaatagtgaagttgcagaaggcacattagagatagaacagagcttctgtctccactgttgctttcttcatgaaagagaactcggccaagtctgactcaagaaaacaaatgactaacaatttgcatatttgctcttaataataagtgaagcattttttttttccttagcaaccaggattttcggttaactctaaatgagccttgttataggaaacccttgaatttcaatagttgtgtctagttgccatagttaaaatattacatataagtggccacccggaggttttacagattcctcaatatttgtctttatgaatacatgacaatcagaaatataaatagtaagagttcagggaaacagctacataatgtctaagtcggggtttctattcctgcacaaacatcatgaccaagaagcaagttggggaggaaagggtttattcagcttacacttccatactgctgttcatcaccaaaggaagtcaggactggaactcaagcaggtcaggaagcaggagctgatgcagaggccatggagggttgttctttactggtttgcctcccctggcttgctcagtctgctctcttatagaacccaaggctgccagcccagagatggcaccacccacaaggggccattcccccttgatcactaattgagaaaatgcctcacagttggatctcatggaggcatttcctcaactgaagctcctttctctgtgataactccagctgtgtcaaattgacacaaaactagccagtacacataatattcttgtattttagttacctggtccacatattactgtatatatttcttcatagattctgctactttttccaattcaaattcagaaaattctaaaagaaccatcagtgctttgcttgagagtgtagtaacatgaaaagtagatttctcctactgtctttaattattttttaatcatgtctgatcaattctggaacaagaaatgattctttccattcccattcattccgcttctacctctcctcatagcccaactagtagactttcacatctaagtgttcctgtaaaacagaactctgttgaggccaattaagagaaagttattttctgctggacaaaggaaagggagctacctctggccttgactagagacctaacattccaagctatctaaaactttagatttaatgtatccaggcctggcagtcttctggctaagaagattatgtcacctcaagttatgctaaagagatggaaggaataattatccttttcatgcgataatgtaattttctttcccagacacagtgtgttctgtgcattcactatatacccaccatgcaacccctttaggtctgccttcttttctcaaacttggcacaagaagacacaatttcttctttcttcttttctgtctcttttgtttgcttgctggtcagatcctaagtgtcctttgtcttggtcctttgaacctgtccactctttctctgaagctacctccattttgccacttggctgcttgtcaaacttccatgcctatctcaaagagccgtctcttctaccctccttctctgtgcagttgccgagacttacagcttgcccactgtgtggtttctcttttaaactctaataaaattgtcctcaatctatcttctgaatccattcataaactctctcattaatgagactaatagtcctcaatgtgtcctcaatttccccagccaccacacacactccacatgggatttcccataagcggtttcagttagctttggggttgaggtgggagtaggaggtatgcttaactctcaggggacaatgttgactctagcactttaaggacttggttactgttttcaatagttttgggaagtgtttatttttttccaaatcattcacagagatatatatgctaagacccttcccttacagatcaagagctggttgtatacttgcctctgtcctgctgtgcccagctgtgactcttagaaccttagaaaagtagagcctgttatcatttatttgtctacaacttaaaaagatggtgacagcagctgagcctactatggaatctgttatagtgaaggaacgcacctcatagttattttattcagaattcattcagcaggaacacatttctaatctaaaatcaaccattgcaattcaaactagatatgaggcttcctgccacctcgtgtgtttatcttgaaaagataaagaaaggaaatcatatgaattgaaaatctactccaagactaactgtaatcaacaacagggatagattcagattcgtaatttatttctgtctcagacaatgtaaatacagtggacagttaagcatttttcttttctaagttaaataaaattattttcaaattgctttggagataaggttgtgagtagggaaagattaaaagaaagtttcatgataggtgcaagaatatgaggatttctgtgtgagtttcaccacactgtcagtaaattaaaactcccattttatatgcattcaatacagagatagttgatcttctagaaaagtgtgctagacattgtgagcctacaggaagaggcaggctaaaagataataatctactctgagttactcacatgtatgtgctttccaagatagtatgtgatattaaacaatcatgccacaaattgaatttgtggcattcacaaaatatatcgctctctaaaagaagacaatgcatagaaaagatcactctgtgacaaatcttaattctggccttctcaaaatttaagacattttacactttttcttcaaagcatgatatccccaaaactaagacaaaaaatatttcttttgtttagtatattcaatgcctctttttggtcagtctttctcttaggatataaaaataatatttataataagagtaaatattggttaggagtttatcataacaacatatagcaataacaattattttcagagtttagagaatgaagatgcatgaagtaatctagcctagcatacagtagcagcatcctccacatcaacaaagaaaagtcctgctccttcttcatattccagagactcactgcttccatctactcacatttgcctaacaacagctctggttgttctcccgtgagcaggagtctgcctccctataagatgctttaataaacactaaattctcagtgttatctcatccttagggtcttcccaacttactctaaattccccacacagaatcagttccttcctagggatctttgacccatgtggttgatttatttgaagcaaaagcctgactgaatcaaggtgggtgtgctagttaaggctcctattgctgtgatgaaacactattaccaaaacaacttgagagaaaagtgtttgtttcactgtatgctcccaggtaatagtccatctctgagggatgtgagggcagagactcaaacagggtaggaagccagaggcagaagttgatgtagaagccatggggggcactgcttactagcttggctcctatagcatgctcagcctgctttctcatagaatccagggctgacccccagcccagagattgcatcaccatcctcaataattattggatcttatggaggtattttctcaactggggttaccttctctcagatgactctagcttgtgccaagttgacataaaattagccaactcagtgaaatattactttaaaatattatccaatcatttatacacattatcttcccccaaagggatcacaaaagggagtgcattacacagtggctagtcttcaatctcttaatatatttgacccattcatatttgatcttatagtgccccgcaactagtgagctaaaggaagatgagttgtacactgccaaaggaaagtaaccagagtctctaaaccacttaattcaagtaaaatatataactacctttaggatttgattcgttgctgcactcacagagcaactccctcttgtagacacagatgtcaagaaaatggagtagatcatcagaacaatgaacagaatggtaaacagcatcacactagtatgcccccacttggctttgtaactgggactctcagtttcctgtttcaagtgagcttttcaggatacacagtcctggagagtatgggagtagatgacttgattttcaatacttccttggccagtctctagcccttacccaaataaaggcattggttattcagaaacatgggtgattttggtcaaattccacactgtagtgtttctgctttgaataatactatcttgctttacagatgagttcaccaaatattgtattttccagttggggctggggaagaatgaggaacagaaggtaaacacacaaacacagcccaccccaagcagcatagcctcaagtaggaaccactcagttcgactctgttacctttctacccgctttaatgtgatctgaaataagataaggccttatcccattctctctgtccctttagctttccatgtctgtattcctctaagaatgccagtacacataactgtgctaaagaatagacctcagtatttcttcatagttgttgactagcagtgggtatggggctatattatctctgcttcaaacaaatcaagatatacaggtggcaaccttttagaagtgtcaagttctctctctgaattaaccatgtataaacatttacacagaaaactgggtgctgattttatcggagacacaaggagtttgtaccatagccacaaccttactagaagacagtataatacttacattaaatatttttaaaacagaaaacaaagaactcaattctaagctgcgagccagtagaagaaagatgtacactcccgaagtatatcatatttatacaatttcaaatcttcaaatgctttattgttgcttgaatatccattgtatataacttcaggttcaaaaacatttaccataactcatacgtatatctgtttgagatattagatttctgtgtttctggttgtcttaatatacttaaatattatttctaaagtctgtctattacatcactagattgattatatatttgagttttccgtgaactggtttacttggttgaattgactataaatcccttgacacatattgatgactgctcattttcttgcccagggattgtttcttttactcatttattttccaatttctctgtttcttatttgacagtatcacatgagaagcaaaacagagcactctaagtttgcaagaactggtataaactaattagcagattttacgatggagactattcccttcccaggttatcatttggcttagacagtaaacagagaacttagcacagcaaggcaataccttcattcagacttggtcctgtttagcaggtggacttcaagtcaagattgtggacgttgttcaaatagagaaactgtcagtttaggtgtgagttacaatataaaaataacctcaagaatgggttttgagttataagaattcttggtcttccattgttagcagaaagaaaaccacctctttaataggataaggtatattctgatagacagaccctgtacacctggagttcaggtacgtcagagagaagctccccacacacaggtgtgcaggagcattgaggtgttactaacgaacaccaaagagaagtgttgaatagtttgttatgcgaagaagatccagaaataagagtggaaatcagtgctggctcatttcatgagccgtgggactggcaacccccactgcttaaaaatcctctttaaagagcaagcaaatgaattggctattccagttgttgccacctggacccagcacaaaataagcctactcttctctgtggagtcttgaatatccaggtcattacaaggtgcatctaaatacaatggttaccctgattctattttgttcagaatttactcagtactttgtttctggagattgttttttgtttttttctttcattttcttgtgtgtccttattataagtttaatttgctacctaaaaaaaaagggcaaaaaaagtaagcaatacttaaaagaatgggagaaaccaaaacaaccccctataccctcccaatctcttctatggaaatagtttatacattctaacattaatggcaattttctatgtagaaataccttcatgcaaaaaaaatcatcaactacaacatggctaaagtgacacagacataaaacaaatgaggttctgaaatgtcacccaccatctacctatcatcactacagcatataccttataaatttagggatagcacatgaaatacttcccatcagagcaatatacataaatatccccacaaaagaaagcactaaatattttaatactttgcttcaaactttaatgatttgcagatggcatctagatcttaaaatatatagaaagacactttacagctctgactaaatataaataatacattcatctaattcatgaatggcaaagacacgtccttctgctgatgaatatgctcatcatccatgactgccagtgacaattataaggatacactacaataaaacacagtgcccctgtgtagagataatgggaagtaatccattccatgaaaacagtaattaacttgcaatctttcattactgctgaccagttacagtggtgtcaaagaacacttgctgatgcaaaaatacagattagattggggttgataaagttgcatttctcagttatccaggcaggaattgttaaggatatcagattttaaaagagacaatgaaagcaaaactctgtgtgtgtctgtgtgtgtgtgtgtctgtgtgtgtgtgtgtgtgtgtgtgtgtgtgtgtgtatctgtaagttctgtgagtgtgtctgccagaagataatattgtgcatcctattgtatcattgtgtgccttactcttttgagtcagagtctctcattgaacacagaacagaagtgcaagctcatgagcccaggcaattctgtctccaccccacctggacagcacttacatgcgtgcacatggccacacctagctttttacattgatgatataagccaaacccaaatcctcatgcttacacagcaagcacttttacccactgagttatctctcccacccagagtgtctaaaactataaaacaaactcagaaggaattgagcaaccacttgcttggagatggtatcacaaatgtgtagtcaacacatttgagcaaacagaagcccaaaagcacttacaggttcttataaaagcattggaaaaaaaaacttactaatgacaatggaagtggttcactttggaatacaaggtgtttcatttttcttaagtttaatttcacaaattgttcttaacacaggcaggttgtatacattaaagtaagcttagagcatttaatatgtactctgtggctatcaatataagtgatcctaaaacaacctttcggttttcaattacattattgtggcaataaaaaaaaatgtatggatgttagtaaaataaaaacctcacactcaaattatacaagcacctgacagaatgcatttgttgaaatctgtatgtggtttttaaaatgtttaagaattgaaacagccacatcttaactttcaagccctcaggttcagaaagtatcaatgcatttcagtaatttgcgctcagaaacattattctggactttgaaattcaaaaaatagagggtttctttttggattattttatgatcagcctatagtctctatgcaagtaaaattaaagctgtctgacaactcatgggcacatcagtcgctgttaaagaagtaggaaattgcgtaaaagcatgaaaagcactgggtaattttgcagtttcatctctaaacataattgtaaggatgcctgcctttcaattctctccccctctctcttctgaagcatggccttttagttcttgcccttttaaatagctttgcctactgtcactttgcttgttaatgcacgggttgatcttacccagcatagaaggtatttacagagggtacttgcttttatctgtattcacagagaatgctaacaaattagaagaaagtgccagagaacaccacataccttgcccagaacattataatggtttctgcatgcatgggaagtgtgaacactccatcaatatgcaggagccatcttgcaggtaacattttcttttttaaacttttaaagagcataaggtaaaaatgtagaaactagcttttatgagctagtggaagtggtttatattctgcttaaagagggggcagcagcaaaatttgtctctcctatacagagagagagagagagagagagagaaagagagggagagagagagagagagagagagggagagagagaggagacatgtgcataccttcttcaatttgtgtgtagcatgccatgctgtccatgatgtatactttaaagggcatggtacactttttattcacaattctttcctctgagtgtagagttgtgcttggcacttctcagtgtttcttgaataagtgagttatcatttccaaaatccttcctatcgcctatgaaacatcatcaaaatggctttcttgggtactcagtctcttctctgtagagcctggtgtcatgagatgattggccttacctccagtttcaagctcagacacaaagaaactgtttgtctggcttcagtttataaatatctactgagtattctatgtctagaacaaacattatgtctgagatggcaaatcaaaatgaaaatatatctatatttaaattaatgtacaattggcataggatgaaataaattgattatgatacagaaatatacaaaaacatcactatatgtgcctctgtctctgcctgcccctctatctctgcctctctctctctctctgcctgttcctgctcatcttttactgacaattgtcttctctacctgtttcctttcacagtatacagtggtacctgcctgttcttcaacaggcaaagtagacatgacagagaaagcctggctgccccttcctcctaaacagttattaaattaaatcctctggacgcacataggaagttcctcatgatatagttacaagaaattcaaagacaagaactaaaagctttccacaagacaatgccagactgatccaatttaatacgttttcacatcacatgttcatttcattatgcagattgaatacattttggtttgaaagctgagggagtgagacacacaattcattatcaaggaaggctcacactagcttcatttgtacacttttattgcctataccataatttttttgaaaaaacaaaattctccttcagaactttatgaccagcaaatttaagaaatttgctgtatgtctcattctaatatttttttcaacatttctcgaacattggcatataaaatgcctaaaacaaatagactttttttttttggtattgtgtcattaaacaataagtaagcatgttaacttaggttaaagaaacaaactaaagttctgggccacaagtaagaagctgttgtcctccttccagatgcgatgctggttacactggtcaacactgtgaaaagaaggactacagtgttctctacgttgttcctggccctgtccggttccagtacgtcttgattgcagctgtgattggaacaattcagattgctgtcatctgcgtggtggtcctctgcatcacaaggtcagtaacgggacttgggcatcacccaagctaaggcagcaggactcctcctctgatcccgagtctgagtcccttggtgaattaactgctcccatcccttctccatgagtcctagctcatcaccataagaatatttgaatagccaagtggagaggcatgggttttcctcattagttttatcatctttacactattatgaggattgtttatgtcctaagcttatttctctttctaatatatatatatatatatatatatatatatatatatatatatattgccaacctctgtttaaagactcttttcttttgtctgcaaaaacctacttttcattctgactatgaaccagcgtatctacctactggaatcactacaccaaatgtgagaagagataatatgtaaggtctaatatataatgtgtaaaaaacactcaaactctagctcccattagtagcatttatatttccaagtagagctttcaaataccatcagtgttaccacacttggtgtaaacaacaatagcttgtaagttcccttcacaatcttttaaatggaatgagaaaggttgtactgtagtaaacgaaaagtctttgatacatttctgaaacatggagtagatatcgcaccttaatagcaaatccctagctcatgaaagggtaatttttacttgaacagggatgaaatagaaagaaaatagagttttcatccagtttcaacaggaaatcaaaccatgactcctgagtggtgtttgaggttcagtttgaggagagatctcttgcaaatgcaagcatgtggtagacaggaactagactctgaacccaatgcatccttcatatcctcagacagccaaaaaggccagtgtagatcctttaaaaaaaaaactgaattaattctattttttcaaaattccagggaagctttgtaaagtttttatcaaatccataagacattaagattctgattcatttatactcactagagaaattctcccaaaattatttataaaaactggaaaataagaagcattatgaaattaaaatgtaaagactgtaatgcaccctggcatctgtattacatgatcttctttaaagacaagtgtggaatctcctcttgaaaaagacaaaatatagctcacaaatccttacctgcctacaggcataaggaaagactattatcagagctcggtgctaccctaagtcggttagagttcattaactagactagatatttagatgcccagtgacccattggatatataaaaataaaggcagagaacataaaaccaactcaaaaccaaaatattctgagcataaaaagaaaagatagagaagaatctaaaacacagaaaactgtgccatacttttctaagcacacatagaaaaataagacttgtattcatattcatacaataacaaattgatggctgcttcatatagtgaagaaagcccaaacttcaatatttcaaaccatgtttccaaattaactattaatcacattttcattcccatacaatattttaaaatgaaataaatatatacactattttaccagaaattgggcatttgtgttataattttgtcatatatttacatattcacttgagtgcacacatgcatgtgtatacatacacactttacaacattgtaaaaagtgagcagttatttcattcattcattcattcattcatcataaatttcatggcggaaatcctgaaatatgagacattctcagatactgagaatacacagctgagtactgaagcaaaaatgacggccagtctgtctactgatgtagctttgcatttttccctgctcctctgctcctagcttctcatgatttgtcttctgcaattgactacctgtgctcagctcccagtctgaataagctctgtctgctgtgtctcccaagtatatcgccttttttctttacttttcattctaaaactaaataaaaccttttctctatctgctctggaggaagagaaagaacacatcaaaaacgttagcattgtcacagttcattatataaatacccccttgtacaaccaaacctttgaaagactttccaggaaaagtgtaaatctatacatttcaccagtatccagggtagattcattccattcattcaaaattagtgccagctgggtccacctctgacccctaagataccactgcttttcttgtgatgtagcaagccttgtttgtcaagatctgttccaaaatacccagatgctagacaatttacagaattatttctagtgtcgattcctcttactgtctgttctttgttctattttctttctcttctgacttaccagtttctccctgaatatatatctctctcctnnnnnnnnnnnnnnnnnnnnnnnnnnnnnnnnnnnnnnnnnnnnnnnnnnnnnnnnnnnnnnnnnnnnnnnnnnnnnnnnnnnnnnnnnnnnnnnnnnnnnnnnnnnnnnnnnnnnnnnnnnnnnnnnnnnnnnnnnnnnnnnnnnnnnnnnnnnnnnnnnnnnnnnnnnnncccctcccccctactctcccctccttctgtctctctcctgtctgttcagaacctgcctttggagaaatatctcataaaaatgagtatctagagacatgttccaaatgagcatcttgtcctgttgagaagctggcttttcagcctttctgccgccatctctcacctgctgagagtgtgactttttagagttgtgtttgtttttgacagatatgtcagccatagcaactacacaagaatatgctcagacctactatgtgtgcgtgtacatgtgtatgtatgctcattcacatattttcctctgtctctcccttagtggtaatagaattttgttaggtttttttttttttattgctcttgcttcgatcattaaagaaatctcttagtataataaaaaatactagattggagattttcagataatgtgaccaaatactagatttttatggaagcaacataattggtgtcaatttatatctctagctttataacattaatataaaacaatgatattaggctaaaccaaagcaatattcttttgcacttaaatttgggtattatcaggtggtttgttctgctgtgatagaatcttaacgtgtagctttggaatgtcaatatagcactcattgttaagacatttatacataaagttgcagaaggcctttaaagtgagctgtgatgagcttgtgacttgcttctttgccttgtgctgagtctgttcatcacacaatataatgaacagacttaaagaataaacagtgaagggcaaagcaagaatatttcccttcaacttctacttctgttcttcagttcttgacaaaagcttaaagacaactgcaaggagaagaaaataataataattaataacatatacatgtaatcagattctatctgtaatcagttttgtttttggttttttttggttttttggttttttggggtttttttgctctaaaatactttagtaatttgtttcatctagagcttcactctttgattgtaggagcaaactttaggtatctacattagactaagatctgtaaactttccaaccttctaggaaatgccccagaagcaacagaattcacagacagaagcaaaatacagggcactacagttcagacaacacaacaagagcatccacacggttaatctagagggagcatgtttcccagtggccggacaaccaacagcttggactacacaatacagtattagagacaaaagaataagacaagatctacacatgttgccttgcgtttgtggtaatctacaccaatgaaaacatgtactacagctatatttgattatgtatggatatatttgaaatagtatacattgtcttgatgttttttctgtaatgtaaataaactatttatatcacacaatatagttttttctttcccatgtatttgttatatataataaatactcagtgatgag

SEQ ID NO: 1743 - DNA, 1842 bp, Mus musculus
ccagagggatgcgggcggcagagcgcgagaggcggcggctgggctgcggggcgctgtgactgtccctccacccagtctggtcgcgctcttctcttcggccgattggccgcctcctctccgcaccctggtttctgtctcctgctcctcctttgccccgaccctgttccttatggcagcagctccttgcatcgggggcgcagcttctcagcggactatcctctcactccgcaggctgagcccggtcactggatgttgctgaaactccggagatcatgctctcctttggtcgcagtatcaccgccggctgtccctgccgccgccccctcctctgctgccgcggtccgcgggatgctcagtagcccgctgcgtggcccctgcgatcccgtgttcttcagaagcctttggttgctgcagagttgcgcgaagtagtcatggtgctgtgggagtccccgcggcagtgcagcagctggacactttgcgagggcttctgctggctgctgctgctgcccgtgacgctgcttatcatagcccgcccggtaaaactcgctgctttccctacctccttaagtgactgccaaacgcccaccggctggaactgctccggttacgatgacagagaaaatgatctcttcctgtgtgacaccaacacctgtaaatttgacggggaatgtttaaggattggagacactgtgacttgcgtctgtcagttcaagtgtaacagtgactacgtgcctgtgtgtggctccaatggagagagctaccagaatgagtgctacctgaggcaagctgcctgcaaacagcagagtgagatacttgtggtctcagaaggatcctgtgctacagatacaggatcgggatctggagatggagtccatgaaggctctggcgagaccagtcagaaggagacatccacctgtgacatttgccagtttggggcagagtgtgatgaagatgctgaggatgtctggtgtgtgtgcaacatagactgttctcaaaccaacttcaatcccctctgtgcttctgatgggaaatcttatgataatgcatgtcaaatcaaagaagcgtcatgtcagaaacaggagaaaattgaagtcatgtctctgggtcgatgtcaagataacacaactacaaccactaaatctgaagatgggcattatgcaagaacagattatgcagagaatgctaacaaattagaagaaagtgccagagaacaccacataccttgcccagaacattataatggtttctgcatgcatgggaagtgtgaacactccatcaatatgcaggagccatcttgcagatgcgatgctggttacactggtcaacactgtgaaaagaaggactacagtgttctctacgttgttcctggccctgtccggttccagtacgtcttgattgcagctgtgattggaacaattcagattgctgtcatctgcgtggtggtcctctgcatcacaaggaaatgccccagaagcaacagaattcacagacagaagcaaaatacagggcactacagttcagacaacacaacaagagcatccacacggttaatctagagggagcatgtttcccagtggccggacaaccaacagcttggactacacaatacagtattagagacaaaagaataagacaagatctacacatgttgccttgcgtttgtggtaatctacaccaatgaaaacatgtactacagctatatttgattatgtatggatatatttgaaatagtatacattgtcttgatgttttttctgtaatgtaaataaactatttatatcacacaatatagttttttctttcccatgtatttgttatatataataaatactcagtgatgag

SEQ ID NO: 1744 - protein, 374 aa, Mus musculus
MVLWESPRQCSSWTLCEGFCWLLLLPVTLLIIARPVKLAAFPTSLSDCQTPTGWNCSGYDDRENDLFLCDTNTCKFDGECLRIGDTVTCVCQFKCNSDYVPVCGSNGESYQNECYLRQAACKQQSEILVVSEGSCATDTGSGSGDGVHEGSGETSQKETSTCDICQFGAECDEDAEDVWCVCNIDCSQTNFNPLCASDGKSYDNACQIKEASCQKQEKIEVMSLGRCQDNTTTTTKSEDGHYARTDYAENANKLEESAREHHIPCPEHYNGFCMHGKCEHSINMQEPSCRCDAGYTGQHCEKKDYSVLYVVPGPVRFQYVLIAAVIGTIQIAVICVVVLCITRKCPRSNRIHRQKQNTGHYSSDNTTRASTRLI

SEQ ID NO: 1745 - DNA, 245531 bp, Homo sapiens
  misc_feature (1)...(245531): n = a, t, c, or g
atgagtgtgcgggtagcccaccctgaagcccgagcttctcatttgagccatccccgcctagccccactcgggccagcgcctggcgagcgagcccatctgtggcttccgcggccgcctcctccttgcatccttgcacctcctcgtcgacccctccctcccgggacctgcatcctgctccaccaatcagagcccgactgcctcttcccacgtgaccccgggcgggctgaggacctgctgcttcccaaacgccagagggatgcgggcggcagagctcgagaggcggctgccgggctgcggggcgccttgactctccctccaccctgcctcctcgggctccactcgtctgcccctggactcccgtctcctcctgtcctccggcttcccagagctccctccttatggcagcagcttcccgcgtctccggcgcagcttctcagcggacgaccctctcgctccggggctgagcccagtccctggatgttgctgaaactctcgagatcatgcgcgggtttggctgctgcttccccgccgggtgccactgccaccgccgccgcctctgctgccgccgtccgcgggatgctcagtagcccgctgcccggcccccgcgatcctgtgttcctcggaagccgtttgctgctgcagagttgcacgaactagtcatggtgctgtgggagtccccgcggcagtgcagcagctggacactttgcgagggcttttgctggctgctgctgctgcccgtcatgctactcatcgtagcccgcccggtgaagctcgctgctttccctacctccttaagtgactgccaaacgcccaccggctggaattgctctggtaagtccagaacccccgtccccgaccctttaactccgcagaagaacacgcgtatccagcacagaccagcctaccctagcgcgcctcctcagcccctcacctcctactgccctagacccctaataccacccacctctatccagagaaacaaggggaactgttgcaggcccgggggtgaggggtggttctgggatgggcagaaagtgcaggtgtagcaggaaacctttgcatgcttgcgcttacattggagctgcgaggattttgagaaatattaaacgggatggttttctgggttcactgttttgaaagagcaccaatcctaggggaaacactgaaacagaagctttgtcatcattaaagaaaaaagtcttactaggatgaggaagaaataactttatgagaaagaatgagcgagaaagcaataaatcaaatggtgactgcaggggaatcgctgattcctggcaaaggtgccatgaggtcgcactggtctcccgttgaagaccaggtcacacagattctagaggagctgggtttcaatagaatttctctctctctctctctctctctctctctctctctctctctctctctatctatctatctctctctctctctcattcccttctctcctaggcggcaaaagacattggttttgcagtccagatatgcccctctctttgcttccctaagcttcaaggtagtacaggggagttgagaaaaagaacactttgcgggtctcccaggccggagtgggcatgactgaggctggtcaggctccatgtaggcgagccgagggcggaaccgacttcagtgggcgctgactcctccatttctggacaggcttctgtggagtgggtcaggcactcttcttgctcgctcgggttccttcagattctgacggcgaacgcttggcaggcttcgctctgctgaagcttcctaattaaatagggccagaggatgggagttgctgcactcctagctggcatagcatttcggtttgacagcctgtagtatactgggcagaattgtggtgtaatttccttggcattttaaactccgttaacatgcctgggtattgtcccctaggtgtggtctgttctagttttagcaagtgtgtatgtaatttttcatcttctgtgaatataattttgctgtagttaaatctggctctgaataaagtgtctttcaaagatgtatataagctgaagtgtatgtaactttagagaggagggaatgaccaactgtaactcagggtgaaagcctgtatagttcctagttattactgatgtaaatgccaaaaggaaaattattatgcatcattctaatttatcctttacaaagacaagttgagatatgcaaccctattagatttgggtcaatagattgttctcttttttggcagtttctaaatttggcattttaataaaactcaacatgtttctataacttcttgattcatgcgtacatgtgtgttgtttttgaaagaataagtttcactttgctattgcctaatcactttttagatgctttattatggtaataattatgagcctgcaaaaacaatttttggaaatgttgatggctttgtagtccaacacagactggtttgcttcattcctagcccttgcattgttttaggaaataactaacttaaatgtgaagttgacatttgcaatcaagaaattacatatttaccagatattttaaaggggactgcataaactaaagagaataaactggttttgcagataggttgtcaagaacttggcaccccgcttccacccctgttaacttagaggtgatcaatcttcatttgagccaaacagaccatcacagaaaacactgtgcctgtttatctttattattgaggctttgtttcctctttgtctggatacatttcaaataaggggttgtttcagtcgttgaagcaaaagaacaattaaagatgggaaaatggtaaaagggtattcagagatcatcactagctcttttccaaaatgtggagttttgtggtcataaatattgtccacctaatgagcaaaaaataaaaataaaaaaaaaacaggaagcaaatgttaagctttcattcaccactgtcagtattaacgcaagctttaaaaaatagcactatcagaaaaggatactaaaggagaattgactagaaaagaattgtggaaaatggaaacgaatattgatcacttaactagattttgaggttatcagtagacagtgaccttgcagtacagctatagttgttggatttaaaatttaggacaagtattttaaagcttcaaagtagtgcttttttttgttaaaaatctgtaagatgttttaatgactggagtgttctctttgaatttgaggttatgatgacagagaaaatgatctcttcctctgtgacaccaacacctgtaaatttgatggggaatgtttaagaattggagacactgtgacttgcgtctgtcagttcaaggtaagaagtcttatatttgcatcttctaattcattaatgagactgcaaagcaggaatcttcctttacagcctatcacttggaaatttatagctatgcaagctaagagggaagctggcaccaagcaaaagtactagcaagagagccaactgatgtcaagaagacatacgctttttggagaaatgtatatgccaaagttataaatgctgctggaggtagaaagcttcaggttgtgcttttgggatgtcaaaggaaaattatgtttctctgacccttctagcatcactttaaaagtgaattgactggggataatagtcaaaatagggggtaagaagtgtggacttattcttttgttctttttgattggggctatcatctttttatcttattgctatctgttttaatggtcttggcctttattatccttgcaacctgactaggtttttaaggtaactccttattagtgtaacttcaacactttgttctaatttggaaatcatggaacttattaattagtgtatatcagctttttcatagataccacactcaattagaactgaatcccctaggaatccagaagagcatttagatccacaagtcattttatgaacatcaggaaatgtactttttcttgtgttaatttcttttaactaacaaagagagaaagaagttgcactactggcatgatcaaaactgggttattagtatctattaaagatagaacttttagtgtcattagtatagtcattagctaacaaatgctttccaccatgtaagttataaaacttttcctctcaaagtgttcatataatcatgcagaacttcaagtagcatggatgttgtactaatagcctatatttgcccttgagtattttaagttacttttaaaaatacttttaaaatctgacaatatgactcaaccaggaaatatgcacataaacaaaactgtatgtgagataatgaaaacttttctaagattgtaagaataaaaaaagatatagaacaaataaaaacaataaactcaaatttagacctagatatctggttaataagtaatatttagaattattgatgaaatttaaatattttagatggaattcaacctcccactaagaaagagaagagaattcacatttaaataaagtttaagtggcttttagaaatgctaaaaccttcttagacattattttattctttctaagaaacataataagacaactgatatttgtaaagtgcaccacctcctggtgggtaagtagtgctctgactgtacagttttttagaccataccatagtgtcagaaacatattcttgcatatttaatatgcatgtaacgtcaacttctaaggtctgcagccacattaaacagtgccattatgtacttccaatgaactacatgagagagatagagtatgagaactccccaattcatacttacccaaatgttaactaaacaggaaaaaagcacagttggataaatcattaattaaagtcccagagaattttgtgaattttttccttctttccctttgtgatttccataaatttgtcttattttcataaccatgggtagacaaaagcaatgaactcataaaaagtatcaaatgaaccaggaaaaacattcctgaaatgtaaagccatggttctaagatttcaccaggagaaaaaaaaaaggggttgacagaactctaaagggatgaatgctacgaaatgaaaataaataattttcttattaaaggaattgttttcattttataggtgccacagaagattttggtaaaacttttatcaacaaaaatatttgtgtttttcatacattggccagtcatgtttgtcattaatttaaataatcgttaagtggaatagatgggggagtggaaacgaatgcaagtctgtgtaagaaactaaaatgtaaattgtttttttgtaatccttgtggcattttaaatgtactagtgtactactactgctattagtttgtgctttgcaatagttgtcaatctggcaagaaaaaataaacatctccctagtggaaaatgtagactttgcacataccaagaatatagagtggctgaattaagctgaaaatcaaagaaaagtataagttgcatgaagaataataaataggatattttaagctaagagtctcttgagtccatcttttcccaatacatgaatttgagtttttggtgtttgttattttagccctagtatctgataaaaagggagaggtattgaaaatctattttcctatatattattctaaacttctgtttctttctctgctgccttttcaggtacaagcgtgcattcctttttttttttttttttttttttttttttggaatttttggagacaagggtcttgctctgccacccaggctggatagtggtgatgccctcttggctcactgcaacctccacctcctgggtcccagcaattcttgtgcctcagcctcccgagtagctgggaatacaggtgcactccatcattctcagctaatttttttgaattttagtagacacacggtttcaccacgttacccaggctggtctcaaactcctgcactcaggagatccacccgcctcggtctcccaaagtgctaggattacaggtgtgagccaccacacccagcctgcaatctatagtctttctagctgagagataaatttcaaagagaaatgggcatatatttttatatctataatgttttcaatttgccttatcactggaacactaaagtaaacattattagccttcacctctcttagacgattttaaataaactgatttctgtccttcagacatattatctcatttatttctcacaacccggtgagataattgttttctccccccttttttaaacttttattttaggttttggggtacatgtgaaggtttattacatatgtaaacatgtgtcacgggggtttgtcgtacatatcatttcatcacccaggtattaagcccagtaattatgaggatgaaaatttggagacagtagatggacagatagatagatagatagatagatagatagatagatagatagatagatagaaagaaaagcggggaggaaggaagggagggaggcagagagggaggaaaaaaggaagggagatacatgcagatatttatagataaccctggtcatgcagtgatcaataaccactttataatttaaaaatatgatgaagccttatgtttttcaggtattacctaattcagatactaaatgtttttatttaataagtcgtgctttagatctacaaatgttcttattagtaaagctgcgtaacagactgcccagtacttagtgtcttaagacaatgaatatttattttgttgatgaatctgccattttggtagggcttaatcgaaacagctcacctctgctctctttggcattagctgatggtgaggggagggaattcaaaggcttggtgctataccgatctgagggttctcactcatatgtctcactgtcagctgaagaccttggttcttctccatgttgatctctttgcacgggcaagttttgtcttcctcatagcatagtggctgagtttcaaagtcaagcatccagagagaaagaaagagccaggtagaagctatatccgttaatgacctagcctgggaaggcacacagagtcatttccaccatagtcacaggcctgtccgctcttaaaatcataatttttttacatttaaggaaatataaatcacagaaaagtaaaaattacttatggaatggccaaaggattggaacatatgcagatttttttaatcttttttcccttttggaagaaaaatataccatatcccaagccattcttcttaagcctttgacaactgggaatataacagaattgacttaacatctgttgagcaccttctacatgccagactctgtggaaggtgctggcaatatataaaacataagtcatacataagcttctagatgctgaaatctcagctcaaaaaacctgtattaatcaaacaagcaataaatcccatgaaaaacttctcacataatgtttattaatttgtagcaaaaatgaatttcatgcattctagtgtgccaagtaattgaatccactagtgtggtgggtagcccattttggaacagaattcttctactgaaaaacacttatttggaaaataaacataagatttttaaaacatagaaaaatagaatcactttctcccctgagaggaagtttgtacaacacatacgtttatggacctaaccatctgaacttgagtcttgtttttcctcttaccaggcaactgtgtggtctttagcaggtcacttaacatctgagtccgtcccttcatctgaaactgagcagtatcatgaatactactaaaaactatttccaataatttggcatattttaatgcagtagttaggctatttcatgcttagggttagcctgtttcctcttgtttttctaattctagaaacgccatggcttgatgttagagttagatgataactctactagttaaaatacatatcatacaaagcaaataatttacatgtctttgtataagtgagtattacaagatatttcttgttttaaaaacatgactttgttaatttcccaaaagttccaggtaagcatttcaaatgggaaaactaggctataaacctgttaaatatttcattgttaactaatatacaaaaggtcctacaccaagacagtgaaagagataggacaacttaggactagactcccactcgtgagctttcatgatttacagcgtgcttccttctggtgttcttcatattaataagtgcaagtcttgatactaagggccaaaaacatcatgccagtaatctacagttaagctcttttcagctctgtagaaatctcccttttggcttgtgcatggaacttggcagctctgtttttagaactgttcgaatttggcttactgcatccctcagaagcggcatatgagcactttatcagtttattcgatattttaagatgcatatcagcattgtgtactagcacttgggagagataataaatactttccactctccactcccagttcactgactctatatttgagtaatctgagaaggataaataaataaaatttaaggatcggagagaagaaaacacggacccaaataatctacatacaaagtattataagcagggatggagatggagattgaaaggtagcccggggcaagaataccaggcctcaagcatgagatgttaactagtccagctagccatagacacattatgactctcttctgtctactgaaaggatcggcaagtctatcgatcattatgtcaccagctgtttccttctttcttgtctctcctccacgtgctcagacaccactgtagtgttcatagatcaacataatcctacctacattctcctgtccctggttctgatcatagcacatttatcaagcacctatccctgcacttgccttgctggccacagttctggcatgagcacaagccacatttatttgtggtctcttccgtactactcattggaaaattcaaatcttacaagcgttttgctcttgccttctttcttggatggtagtggagatgctcaggcctgtggtgagtcagttttcagatgtaaattaaaacaaatttttggaaagctcctggaaaacagtgcttacacaggtatcacctaatcagaagtcagttgctgattgagttaaacattagcaaaagattagtgaaaagctctaatcaaatcagttttttaaatataatcacatacatagactgagtctgggagacaaaaatgtaactgtggaaaagaattactatatagaggacttgcagaatatctagattatatattgtagaaattaagataaagaatatttataaaatatgtgctaaagcatcctgttagtaattatggtcatcttaatatgactgtcataccatttgggtttactgtttggaaaaaagttgatcacaattaccaaaacattatatttaagttgttaataatatatgaaaaagtaaaacttatagaattaggctttcatttcaaagaacattgacatttaaatttgttatgataattaagctattattatataaaggcaaagagcaagagttaaatagttgattaggaataaggaggtttaggtattgttaggaaatagagtaaaataataaatttcaggttttaatcaatcagattatcaacatgttgagaggtgttttcttttgcatacattcttgagttgaggtttatttatgatagggttttaggtttgttatcacatatatttaaactttactacccatctcactgtattattggtttattttgtatgtattctgaactcacagcacatcaaagattcaaatatattaatcaaaagtaaaacatagagtttttaacatgcatctgtaagtatgattttccttacttagtttctggcataggtgagcatatacagataataatcttgatcattatattttttataattaaacaatgaagcacataagtagtagtaatcatgagataatcacatccctggtgtaattagcaggcataggacaaagccaagtatcattaatgccttagagtatgattatattatgatgactataccctgttggttgccttaattttcactgtaatatgtgtacttttttaataatgaggttttttaaaaatgaacttttctctttatggaatatctattaatagacatactttggaatagtcggtaaagtttacttatagttcagtagttgttgaaatttttctctgagttccatagttttgcttctctctagaccatatccacatcaatatacaatagtctaaagaggtataaaaataagtaaatcagtatcttatctgactatttggaaatttacaaggactagaattcaataaaaattcaattaaattcaattaaaaaaacaactaagagttaattgatttctttggcattttggctatatatttccactcctagcacagatagacattacctttgttttttaatagcttgaaattaaactgtattttaattttttccatcaagtcatatgggctacatactaaaaataatattaagtagcattaatatatttattcctatatctttattgtgctacttgtccagtcactttgttgggaattgcctgatcaatttagatgcttatttttgccctatctaaatcaaatgactggttggctaacttgaaattggctttgtgcatctttcaatgatgcccttataaagacttattggacacaattagaatcattgaaaatgaagacaagtggtttcttttgtaaatgattatttctgttcatcgtgtcagagggatacaatctccagtactaactataggcttacatctgtgtgtttcccagtgcaacaatgactatgtgcctgtgtgtggctccaatggggagagctaccagaatgagtgttacctgcgacaggctgcatgcaaacagcagagtgagatacttgtggtgtcagaaggatcatgtgccacaggtatgtgtgtgatcttctttgaaaccttctgcatggattccaaatccaaaaaccatgtctttcatttcttgttatctcccaataaataattcagattatatgttgactagacaagccgtattgttttgttcaaaacatttgttattcttattctttgtcatttttacatttcaaatcacttttgcaagaaagaggatatctaccataaggacactggtagatttaagtacgtatgtcattaaatgaaatacaggcaggttgaataaaagccacatataattagaaatctagatagactgccaacgtgccaaatatggagaaacctgactatgtatgaatacagttgtattgtttatttgtgtttgtttgttttgaacaatagcattatctgctggaaggcaatcttgcaggtttgggctctgaagttgacgtctaatcttagcagctctacaaaatggtcttcttactatttagtagattttattgactaatgtgtttgtaatggacataatttctagtgacatttgtcatttctgactcaattaacctgggattctacaaagttttttagtcatggcttaccaacaatgctataaaggaagtaagaagaaagagtgacttcatgtgctctgtagcttttcaaattttccttgtgtctacagtggttgttagagcttatgctttaaaatggggaatgctttaaaatggggctgagttttcaagttaagcttgatatcaaaatcacatatattgtagaggctgtaaggtgccataatagttgttcttaatggcaaataagcatctttctggaaagtcataattcctgagaatttggatgatataagcatattcaggaataataacaacgtcatcaattataaactttctctaaaaatagaagcagagaatagtgtcatgaaaagtctatttattcaaaagtccctcttagataacaggtatttctaatctagtgtatgatgttaaaagttatgtgctaagtgactggggcagggtggaaaatgagcaaagagaaaagcctcatattctttaaaagattatcttaagcatattgattgttagtaattgataatactaagttatactggtgactacccaagtttctgagaattagcagaagaaagagaatagaatcatatctcatggccaatgatgttttgttttggttttggtttgtaagtagtcttttctcctaagggattatttgctcagatgtgaatgttcttcatgaaagggtggtcaggaggcaagctgggctggtactccatttgtttatttgctaaagcaaacaggtcattgctgcttggtctgtgagtgacaagtcatgaataaaagaaacagcaatatgtgagagtcaatgggcagccttctccaataggaaaggaggaggaccagcatgctgctctcatactaaggatgggggatatagaaagtttgacaaggagcaaactaattatgaggaatcagtcagccataccaaagaaatgagaaatagtactttaggacaaattgaatagaaaaaaagtaaaatcccaggaaccaggaaggatgaaggcaaataccgtagagtattgaggaaaggatttgctttttcaagatcaagatcatggaggatatctgttcttttctaacaatagccacatgagaattgccaggcaattgttataataaacagaccagaagttacggttatggccaatgtagcaaaatctctctttcttacttgccaacctccaagttcttgtcagcgcatataatcacattctcctgattcattcaagtctttccattctagtccctgatgtgctggttatactatgaaaataaatacttagccaagtagaaaatttaatcacaatcgagtaatccatctttagctcattcacatacttagatttctacaggatttaattagtaagccagtcttgctgaatgcatcttccatggacttgtaaatctaaaaggtttttgatctgaataatgacggagagaacaaagtaattttgattaaccaggtctgactgtaaataaattggggttctgacttttgatctaaaagggattctcattcttttctttgtatatttcccatttattttttaatgctgtttgacactgaatggaagtggcaagttgtaagctctaggaataataggcagtagaagatataactttatatttattatatttcattgaacttaatttttttttgtccagagaatggactcttattgtgaaatctgctcaatggtcttaccgtcaatttaactttttgccttgtaggaaatgcattaactaggagctcagatttaggtctaacagcatgacttcttttcttaggtgtttctgtcttactaataagactttagtaggctatttatcatcagttggccaggatgacttatcatataatagaggaaaatcattaaagcctcccataatgatttcataatgatgccatggacttaagtgatcatttttctaaactattccttcttttttttcctggctgtttcatttgtgtcaaatcaaatattgtcttaaggaccatgccccttgaagttttagaaatgcatgtgggaaatacaagctaaaatgctattggcatttttttctgattttccccagtcatatgtatttattagaatactcgtagatgaataggcaagatgtttactatacattttaattattatgttcctgacagtgcttaagcatttaagatatgctactgtgcagtaagcctcaaaatagcccaatcggttagatattactgtacccattgaatagaggaggaatatgcttagcaaggttgaataacatttctctgtcatgcaatgaataaggtttggagtttgtaactcctaagcctttatgcatttcccattatgttcatataagtgtagagtgatgaacaacacattttccttgacttaaagaagtttataggggaaaatttaaaagaaactatatacatttaactaaaatatatttagaatgtgttatcactgtaataccacagtctgttatttagccctgaatgagtataagtaatactgaattaaactttcaaattaatgcaaatacaatcaattaaaatttttgtctgtgaaagtatacaaaaagcacccaagcactgttctgtccaaaagagatggtgttgtgacttatgacagtcagtttagttggtaggaatattctaatatcaacatgaattcatcagtctttcttggtctattatcattaaacagtcaattcttatgattaaaatccttgtttgattctacatttactaagaataatttttatcataaattattttaccaattaacttgcctttaaggaaaagatatgctgatccaaagacatatgtcctgtcacattaatagttaattgattacttgacattctaatataatagtattagaccctataaatttagttaatgtgggcctccaacaagactgacagttcaaactactgcttcttcatggtactgctaatgccaatacatgacaaacaggagggctgctgggaaggccttccttcttccatatttgtcagccttctgtggattttcaaacaccatgcctctttccatgtggtgtttctcaataaagtatcatggaagcaaacaagtaaaagtcatgttttattttaattggaccataaattcttaagagtggcatttggtataagtcttgaaccctgggtgagatttcactgtggaataagggcacatcaggcagagaatatcaatattaatcttatttccctgtattaacattaaaatacataaccaaatgtattgtgaacaaacaaaaatggaaagtcagaaggaagatgatgtctacacttaagaagtagaagcagatggaatcgtaatggttttgatttcaacttgaaattttgtgtgtttctgggaactaccttcccagaaatagacaactttgaccaattgtaattaaaggaaggaaggggagagaagaagtggtgaaagaaaaatccagaagaggaagtatgattttttctgcaagaatcatttagtgaatatctgactttaagcacaaaggcaacaattaagctgtcttctactgacttcaaaaacaaaggatgatttgacacagatggaatcatccacaattgtggtattcgtaaaacatatcaacacccatataaaatatatttctttttaaactgcttttctctctgttcatatgcaatttgcaagaatacaagccttaattatgggtttatttgccacacgcattagactatttaatttctgaaacttactgattgttacaagcatctcatttttaatactttattttgctaatggcaccaaatccagcctgtcaagattaggaatttttcatagccgagattaggaaattttccaaacggggcaataatgttttcgtaaagctctggaataaaaatgatggataatttattatagaagttacattaatagatattaaattaaattgatgtgaatgtacgtttttggattaaatattagtatttttctcaaacaatattattgcagtattaaactaagaaaataaacttgagcttaaaaagtcataaatatttttgaatatgttttactagcaaatataacttttccccccacagatgcaggatcaggatctggagatggaggtaggagttgcctttttacatatttgaagatttactggtggatattattatgtatatttacttatgtatgttccatttcagatatttaagacaaatttcatattttgcattttaggaaaggtgaaaccataaaaaattgtcaccatattaagtacatgtatataccgtgcaaattatttggcatacttatgaatcatactctatctccagttaaccttccttgttcatttgtttgtttgtttgtttgtaagttatctttgatatggataggcataatgtaaaaacttctgaagagaagcatgtaagcatatttggcagggaagaaagaattcatgaggaaatcatttaaatattggatttttaaatatatgacactgctctcaattactaggtgctaataagacatacataacctaccatatagccaaggttttaattatcagatttataatttgaaactgaaggaactttagttcataaaagtgaaaaagataaaatgaagtccaatgaaagtaaaatattatctttgcttccttgattaaatctatagttatttttactaaagtatgatatatgttcccattatttagttttgtttagggaagtatataagatgagagagagagagagaaactttaaaagtttgatctaatgtacttactaccaaataaagattttacctatagattgaaactaaattgtaaatgtcccaaatacttttcccgatgaaattcaaacaaaattagacttttatacacacaaagcaaaacaaaacacaacctatatataatttcaagattaagaaaaacaaaacaaataaaagcattctctcaagaccttgcttcagttgtgtaaaataattaaatgtgctattccaagttgattttagtttttaaatacagaatttgataaaagataagtaaaagaaggccttgggttcagggtggcagatatttagtgcaccctttatctagttcaggaaacacttgaaagatttatcaagtttccttatgtaatgaaagacttaactagttcaaataagcaatacccacagaacataattagagcagcatattggagcacaatttttttttcataaagactaaaactgaacagcagcagattgaaacacaatttttttcctaaagactaaaactgaacagcagtcaagactcaagcatagaatatgtttcaatgtcccatgatgttggacagtcctttgatgtctggacagtctttctctacttctaataaaagttttcctagctgattaatatagtattcccaagaaagcgtccctagaggttttgaaaataagaccttagaatagcatattaaatcttaaagaaaaaaaaaagacaggaaaaaaggcagttcctttagtagatgttttaccatgggaatattattaataagaaatcaattaattttttaaaatgttgcttttgtaaggaaacagtttctatgcaaaattctgtatattttctagctgtttagttttatatgtagactacctaattttgcaaatattgtgctgagactgaactgttccactgtttacccaccagtcttgttaattttctagcatctttaaagacaaaataaaacataccaagaatgtcttcatttctctttctgttaaagcatcatcatttacttttttctgcttgactatcctaccatactgtacttcatatctttatttttctaacaataagatgtgaactttgtttcacatactagtttctagttttcattcattgttattagcacatgcaaatggaaatgaagtcaaactcactcttccctgttgcgttttatattaaaatctttggttcattatgttgtcttgtgatctgaataagacattttttcaggaaataattttaatctcatgaatatgacatgtataacttataccatataagtgaaacatcacttggaaaacactttattttctttctctttttctgttttttaatcactcttcctttcagttagaggtgcttcatagtaacttggagaaaacaaaaacaacttccgatgtttgctttagaaaaaaaaagcatataacacatttaattctgagcttattcttttaaataactgcagttctgaaaattgtggtgatgagtatttgctcctaattgcatacaatttttaaaattagagactgatcaggtttttctcaacagaactgcttgtttttctagtctacatgttactttggtctgtaagactattagttttaattttctttaaattctttattgagggatgccaaaaatgcttagtaactaaaacctaaaaacctagtttagaataacttgcacaaattcagttcacatatccattgggttgtaatcgtaagatatatttgacttgctatctctcttatacagatgatagactttcctctgtatttttgtagaattcgtattaccaaggttttgagagggcagaatcagcttccttcatttttgaataaagcaaaagtgattgaataacttgtgattgtttggctaatccaacaattgtaactagtgattgttctaactaatctctatataacatattctcagtaatgtgtatttaattaataattgggtttacttggcaagcactttggatggttaatagttattttctaatttcttattttaacaaaagttaatataattccaaaatggagtacactgaacaaaagagtgaagggaacaaatttacttgtaaaacatttatcatgtgtgactatcataaatgatatcattaaacttacaaatctaaaatcatgtaaaaatatatcaaatattactttttaaaaattttcctatattttagcgtgaatgaatattacattagtaatgaaaattagacctgattattctaaaaataatttaagcttaacccatttgcacaagggtatgtctgtcatttactgcatttgagagaacatttttactgcaatataaaagggacataaaggttttataaaatttattttaacttgttattgtacattttatagggagttctaaaatcttcaaccattgacctatttattcagctgaaacaattcaaacagttaactgtattgagataaaacacatttactgtgcttccaacatgacccacaaagatgcattctctcctaaaggaaatttgtagagtaataagatacaaatacttcatacaaatcttaatgtttggctgtcgcatttcgctgactgtatcctcttcttttagtgtttaagaaaactcattaatacaaaagataattttgtattattagttttgaacataggacccgccatttatggaactctgtttttgaacaaaaacgtttgttttgaaaggcatctacatcaaataaacttgttggatagattcacacctgacaaaaaaaaattcaagataaactacaactgtgaattgtgctatagggaggtaatatgtggtccaaattccaaagaatttgagaaagtgatagaaagaaaacgattggtgtttcaggtacttatatatggaagtttaatgttgtaaataagaaaacgggtgtgtgtaggagggataataacctcttatccacccacagacttccttaagcaacaaatactgcaggaagaaaaagtattaaaggtgcctcctctcaaaattcagaggtgtgtgggtggttaaagaataatttttaacccctgcttttctctataagtctttcagtcatattataaagacaatgctatgaatatctctattactgttttttttaaatatttatgtattgcttagatctttgttagattctgaaaaataaataagtctggtgaaattaaaaccatattttaactatcaaaataattataaatgtattatcctgctgtacatgagcagaatccacagttaaattttaatatcatcttatgggaagttgtatgataatgtttatagaaataaaatgtatctaagatacacagcatagatacaataagtatatttttatttcatgagataaaaggaagcacggaacttacttatacaatttatatatttatatacaattttaagataattctttaataggttattgttggatatgtacaagtcaaattaaacttatgtttatttgtataaaaaagccttatttttatgtgaattatccagataattgttgttatgataaatttggtgtagaaaatcagttgacatatggtttttatttaatgaaaaaattccagtacaaattattttcatataacattaccaaagatgtccataattaagacatttgcttcatatacatattggatagaacaagaaaggtttacatggcaacacattgtagatcttgggctgctatttctgattatgtgaactgctaaaaactggcaaaaatattttaagcactttgaaacttggagataattttaaaaaaatccttgtctttctaatgtggattttataatatttagtaatttggttgacttgaaggaaggtagtactataacctaggtatttttgcaagatttctggggctgtaaagatgaatatgacacagttctttacactcatggagattacatgtaaattctcttctgagcacacaatggaaaaaattatgattctaattatgaaaagaaaattattcctctgaagaaataaaatgttaaatatactgtaaataacaaggaattgaatatttattccataaaatatgcttgtaaaaggctaagtaattttcccttccatgttgctgtactaattccctctccaaccagcataccttttccacttctccactatcatggtcaaagtctggcaaacacaacatacctcatcatggttgtatgttttgttccccccaccaagcgcttgggctcacattacagccaaagtctgacaggtgtcaattgtaagcaacttctgctgaaatactgatttaataaagaaattctaccaagcatgacacgtctgaaattcttcccaggcaatatatatgggaagaaagcagaaactatcctctttttgctctgccacacctgagagctgctgttctgctggagatgagcgtatagccatctgaacttcaattgaaatcttatctcagctcttcttaggttgaaatccatcttactttctctttacctaaaagaagaacagtatagcaatggagtaatgaaatagagatagaatgaatgaggaccatgtaatggataacaaaattggaaaaatatagaaagcaaacagaaggaggaaaataaagtgagaatgatggaaaatgaaaagggaggagaaagggacctttgttatcagcatggctatagtttgttttcacacatgaatacgtttttacaaataaaaataactttttttttcttccagtagagcagtaatagctctctgaatttctgcacattgcttaagaatgtgaaatagatgctacaaacttttgtctgaatcatccatatgggtttttaaaaactatatataggaaaagaaagttaatcattgtgtgtagtatgatagaaatggctttggattatgaatcaggagatttgccttctagatttttagctgacttgaagaatgcctgtttgatttttgctctcagtttcctgggagattcacttattttgtcagtgaaacagtaatatgtatctataggaaagatgattaaaattaagtaatgcaaataactttgaactccaaaaaattcaaaatgaaattaaaagaatttatgttacctttgctctttattcccatatactataagaatataatttctccgaagggtttaattagaattttgaatcttttaattagtgattttaagtccatggcttaaagtattgatggtgggatagtaataactctaagaatccaatacagtttctagtatttagaagacacagctagctctgactcctgaaagcaagtggaatcactgtgttaatacacataatagaagataaatgcatccagaggaaatgcagttacacaagataggtaagaaataaggaataatgtttaaaatttcaaaacagtacataattattcttaaaactacagtggcaggcatattgcctttatagaaaaccaataaagaagaagtaggagggagtcacaatgtaggagattctgtatacttacaagaaagaatgtttgtgagggcgctaagcattgcaaaatttttcttaggggattaaactttttagaaagagattctttcaaaattgatgggaagattttattacaattctgcttgatgtcaaaatatgaactagctaaatctataagaatccctatgttcatgtataatgatttataaaatgctgtatagtttatagaaagcactattatagcatttattttagtttttaatttttatgaacacataatagttgtacatatttgtaagtacatataatgtttagatataagcatgcaatgtatcatgataagatcagggtaattggggtatccatcaccttatgcatttattatttcttcatgttaggaacattcctattgtattcttttagttgttttgaaatatacaataagtcattgttaactatagtcatcttgttgtgctaccaaacactagatcttattccttctatttaactgtatttttgaacccattagctatcctgtctttatcccacccttttaaaccacagcaacagcttttggatgtgtagatgaagatcagaaagaatgagcactttatgcagtaaatatggtgactaagccagtccttgaacttcaagaaggaaggaaactagtctgcaagattgccctacctcttgtacttctttgcaacaactataccagacatcatcttctatggtttatataaatcatcaattctaccagcagtccgatgacattctattattacatctcctcatccccttcccactttaacttttgattctgaaatcatctgttctactcaatgtaattatctaagttaatcacacacctcagtccatgggacttaatgattgccaactattctattacttttcccctttgtttatctaaccctaatcccattcctgatcttctgtaagtattcactctaaggtatttgagatactttaaatcattgctaaaaatatatataggatagttgtgtaagtagcagtagaaggtagtggtacaaagcacatattctagagctctagactctggatatgatcctggctcaccacttactagccaggctactggccagtacttactgtagctgctgatcctggacaggctacttagactctgtgtttttcatttctttacttgtgaccctggcatggtatgcaggaaagtactctaaagttgagatttgtgcacatgaaacttagggatttgtgctctcaggatcagaatctgcagaagggaagaaagtaagattgggaagagggtgaatttgaattggtgcagttaaaaaaaaaaaagctacacagcgtggcccatatgagttctcaagatgggatggcctttatgagttgtcatcaattggaaaagcagggctgagcttttataccccaccattaatcaccatagatgtgagcagttcccaaaagggagcataccgtgagccaggcagctctcttcagctgcagactggacctggagagggactcaactgtaagctatctgagtgaaatactcttaagtagctgaggagggaagaaggtggacattgcaccgtggtatccactaagatctgtaaaatataaaacaacaacaaaataacagaattcttaaccttgtagaacttatttcttggaaagagacatgagcagtaaacaaaaaaggaaaaacacagattgtcatatggtaatgagtgtgatgcagcaagaggaaagtgatagaagggaaacgagaggttactaatttggggtgatcaggaatgccttggagaaggatcaggagggaatgaaggggcaaatcctgcagatgagggagagaaggacattgcaggcaaagggaactgcaaatgagaaaactctgaagcagatgcatgtctgggatattccaagaacatcaaggatgttagttgggctaaaatgagtgagaagatgcttggttgaagatgtggaaaaagagtgggagtgaccctcaaggccagaaacagaaagttctttttctgggtgagcagggagccattggaagggtctgaaggagaggagaatgttgtaatctgactggtgattttagaagatcactctggctgctgtgttgagaacatgccttgctgaagtaagagagtaagggagaaagcagggagacctgtgcaattaaaaggaaaaaaaagataaagtttcttttctcttgttgtcattgatttggggatcacagtatctcttgtctattttagacattcactctgctactcatctgagggactttgtgtatggtcctttattgagtatattgagaaaatatcctaggttttgctgtagtcaaatctatttttaatcctcataaggtatttttatattggggttttatttaagatatccttcttctttttgaaatttttaattccagatagtatttaaggcataggaatgtctctgcatgctgcagtgcatgccaaattgcattgaatttgtttcaaatttggatttgaaaatacagctttttctttcaatgtactaaatgaacaatacatattataggatatgattttcaatgtgtacttaacaaagagcaatttcattttctctggtaaattacacactcacttgttacagctttgggattttaaaaaatccaggaataaatagaaaacaatatgtttaaataatgttggcatcctggctcaatgagtcaaaccaaaagaattattccagtgcctgtcacttagtaaactagttctgaaaaatcttttaattttgtgttccttgctgatctctctctgaaaagaataaagggagaattaactggatttcaaataatgttggcctggtgcttccacaaacctattctgcagattggttatttaaactgcattcattccaaattaaataatatttcctataaagttgaactttttctctattttcttctaattttccagctgcattcttactcgtttctcctgtaatttgtctgactggattgctattctgtcgttaccttcttttggtgaaggccacaaacacaaggaacatattagtggaatcagttggagagggaacccatttctataattgcatctacaaaaaaaaatggtgtactctgcatatatttggtcctggcaacattgagaagtttgcatgttcttgtgggcattgagatggtgtgaaagtcattacagatatgctgactatcctctccagagaacatagcacttgcataaaaatatgacctttggcaagtagaatttctgacacactgatttaagtggtagtggtggcaactcgttgaaaggacatgtggagctatacagtgtcatcttttctggcccctttgagcctcgtgatatagtttgagatctaatccttaagggttagagagttttacagtgttgagaattttattcagttactcaaaagacaactgtaatagcaacttcaatgtggttatctttaaaatagctgttattttaaaatataattaaagagaaacacagctggcagtttaaaggaaaaaaaggaattagtagtacagttattatactgcatcttaaatagtggggtgatattaaatggttatattctggaagctcatgcccacactgcctttgaagttcaggctgcccagccacattcaggcattgattcaggaaactcccttggcctttcagtaagagagagctcccttatgccagaactgctttgaaatagaatgtggcagagctgtaaagtgggtccaattctacaagtcagcagactctgtggattttccattgtgaatagttctcagatctatatcttcagaccctccaccaatagtatatttcagcccttaggtatctctcatctatagcattggaaaaaagcctcctaacaggcctccccaattccatacttgcctacctaaaatatttcttacttgcacagtcagaatatttacatagaatacttatctaagtatataattcccctacttgcaattcagcaatggctgtccatcatccttaggataaaaattagtcttcccaacaggagatacaaagaccaccagaactggttcagttcctggctctccattcacatcattcattttctctacctcagacttgacactccagtataactttttgttgatagtagttcagtgggatagaccatcaattgattgcatacctccatgctttgctaatgttcttctatttatccaaaacccttcccatgtttttgcttaaacatcattcatattccaagactaaagtcaatgaaaatctatatcaggatgattgtcctcaatcttctggttggactacatgtctctcatcaattatactttgtatcatcagtctgattcattcaaatagtctgtgtattatatgtgcctcaggctaatgactattaatacctgtatattagaaaagaaagcctggtgcttagtagaattttgttaaatatttgctcagctgaaccaatgcattaatactaacaacaaaaagtgtgcttaattcaggtgtgatggcatgtgcttatagtcccagctaccgaggaggctgaggtgggaggatcgcttgaggccaggagttagaggcagcagtatgttatgatagtggctataaatagcaaccgtactctagcctgggcaatgtaacaagaccccatctccaaataaaaccaaaaatttaaacaaaaaaataaaatttaaaaagaaagtgtgcttaaatttctaaatgtttccactcacattcgcatgctgccatttaaattatttgaaattctaaattaaaagctggatatgaatggttttgtgtactaaaataactgtagaagtattttaacttcataaaagatgactgaaaaccagcaacaacaataaaaaaataatggcatgccaggaggagcctagcaaaaatggtttgcaagcttagcctgagagtcatctaataccagtatatgaacttgtgatctacctcattctccaaaagtagtgtgcagaaagaaaagaattgaagatattttaggattctagctagtttgtttgtaattgaggtaattttcacctatatgaatactctattccacatccaaattacttattcaaatcccaaatgactttggccagagaatgtattatttggaattccatttgatgccttcatttaatttgacattgaaccagttgtggggggtgggtggcaggggactgtctttttggaatattcaaggagttataatgatagtaaatttatgataaagttcataaaatttactttaaccatcaaagcatattacttggaaaataaaatgctagatattaattcctcatatctagaaagtctcttacttttgtgagcaaagagaatagaattctttgagcatttgacttttgaaatactcaaagatatatggagagaaaaatggagcctccatctgatgccatggggattctagatcaaatgattttagagtaagtcacatcactgtcagcagactgaaagtaaagactcaaccaacaacgtttcatagaattgtgtctggcgtgtgctatgtgcttgttaaatacttgttaaattaagggatgaatgaatgaactgtcagggaagtgatgtgaactgctaggaatacaattagttgatgcatgcatcaacacggaagccactcttctacttcccagtaattgctaactatgaccctcaacttactgagagtgggcataggaaatgccataatacacatcatctctgaagaaacctgcaaagtgattctgtttcatccattaacttcaagccagatctcctacccctgtcctcatgctcttttatctcatctgtttgcttcacacatgaaacttcagcaatgtagtaatgctctgatcgaatataaaatgtaagtgtagaggataaaaaggagaacttggaaaaagaaggtaaaagaacaaactagtgaagagaaaaggacttttctatgcaaaataacagaaggagaaaggagaaagcagtgatgttcagcattttgtagaaaagttttaatgtttaagtaagggaaaaaaagatggaattttaaatagctgcaggcgtgggtaggctgtattagttttatacattctcttaacatttcagtattaacatatacaatatttactaagtttatgcatttctccctttgattgtttctatacgcccaacacatgttttgagaagaaaataaagaaaaatgtgttccaggcagagattttttttcctaactccaccaccacatgcatatttctcacccatctaaaatagcatttaatgctgccattagatattttattaggaaaaataggtttcgttcttgccagataagacaaaggttgaaatcaatgcttcattctgctgactaggagaattagacagccttcttctactccagtacttttaaaaatgtgttctgtgggacttgaatgcctcaagatgctattctgaaaagagtatccatttaagtgaggttgataaaagcaacatattttgatgccttttcaagagccatatataaggtgaccaaccagtgccagtttgcccaggatttttctgattttagcactgaaaagcttgtatcccaggaaactcttcagttctaaaaaactgttctaaaaaattcatatatatcttgaagtaagaaatatgctaaattttgtttgaaacgtgttttttaaaagaatacctgacaatgaaacattttttcttaagcaataatattaaaattcaaagggattagtcatctatgatacacactttgggaaactctgccctaatcccatccatttttctcctggcccctggagtctctccattttgttgccccattttgcagggcatgtggagcctgaggaatggtctagtattgtaactgcttgagtttcctcctgagccttagactagaggtacttaaagccttaagcctgaaatttaaaataatttacatattgaaaatatttttatcactttgaaatatttctcctttctcaatatcttttacaaatatgtacctgtcttaatgcaaatcttttgggaatttctacaggaatgtaatacattgtaagaaaaatccctaaaaagtctatattccattttccattacataattctggatgagtctttgtatattttgggaagtatgtgtacatttcaaagaagaaagtcataaagagttttgaggctgccatggtatggcaacataggcattccgataactctcttctgagccctctctgtaagaacaattcccatacctgaggggaggtagaagaacaagacaaggagtaagaagcataaaacggaagacaaacaatgtcaatgcttggaaagggagaaaaattcaaattcacagccacttagtttcacttatttttcttttcaaataaccaacagttaaaagtttcatctggctcaacacacctatactcccactgcgtcacgaactagaaacaggtgccttttccttcacctgcaaacagtcataaaaggcaagcccatttcagtgaacacccgaggactgggcaaatgaatgtatgaaaggggatctactacactgaataatgtttcaaaaactgtatttgtttcaactaattctgaattttttctaaattcagagatatttgtctaacttcctctaagtagttttcacctctaaatatctgagaattaaaaagtatgatttctgacatttctagcacacagtatctactgctaatgctgagggagcattctttttgacaaagtctctaattttttttttttttacctcggagacaagactatgcaaaagaaaaatgcagtagttgcctactgttccctggggttattggagaggaaagggagtggatgggaaagtacttcaaatagtatattacttttaggtatgctgctttcaaagggggtaattatagaaacactgacaaagacacatcactgttgttttacaaattttatgtgtgtgtgtatttgtatgactcacaaaagttcatacagcttatcttctcccataattgataagcccagtataacactctagagactaaactatcttgttttaatatacttataatgagtacgtactatgtgtcaggcattttatagccatatgttaagtacttgctgtaactcttcaagaaagacatatcacctccatttctgggtgaagaaaataagagacacagatattaagttatttatgcaacatcaggtagtgttagtggcaaagccaggatttacacccaggctcctggacctccaaagtttcccttttctccactgtctttatgtgtagtctgttattttttaaagtcaaggatttataacagaaaattataaactttcatattaaaatatgttaaatatgttattttggttaaaagtaaggtgtttctattaaggagaaatacggcactagtcatagaaacatctgtgctatttgttttgtgtgatgtgtctttggcttgctagtctcctgcacatgcaagtatgtgtgcacaggtacacacacacacacacacacacacacacacacacacacacacagtttttattcagagtattcattctgctagtatgtattaataacttttatatattgctatatttgtactctgagcattgataacatagcataatattattatactctgtgccaaccatattttagatgctagagatacagataaagtcccaattcacaggaagcttaattcagaagagaaaaaacagacatgaaccatgcaaataaataagcaaaaacatttcagagtgtggttactttttttttttttttttgagacgaagtctcgctatgtcaccaggctggagtgcggtggcatgatcttggctcactgcaacctccacctcccatgttcaagcgattctcctgcctcagcctcctgagtagctgggattgcaggcacataccaccacgcccagctaatttttgtatttttagtagagacggggtttcactatgttggccaggatggtcttgatctcctgacctcgtgatccacctgcctcagcctcccaaagtgctgggattacaggcatgagccaccgcgcctggcctgtaattacttttaagaaagtaaaacagtgatgttatgcaaagttactaggttttgtggtaagagtgagattttcactgaagccttaagtagtagaaagaacaaggtacacaaagatcagaggcagggcattcggagcaaagggaagagcacaggccaatgccctaagggatgccttagtgaaatccagaaatagaaggaaggtaagtgcagcccgagcatagtgaatgagcaggaaagtggtagaagaggagagtagggaagtggtaaggaatttggaatttattcattgcatcatggaaagcctttggaagacagtaatataatccggtttatattttcaaaagattgctctggcatctgtgtggagaatgaattgtagatgaggcaagagtaggtgcaaagaaagcaataaaaagattattatagtggagcaggcaaagaggatcctgacctgaataatatggtggcaacaaaggtggtgagaaggtgacagatgtcctgggggccatgtctatcctcattatttcccattcctttctatattgttattggtgtgaacaaaaatgttacatgccaacgcaaagaaggatatggaaaagggaagaaaaagaaataaccccatcacgtcatttagcactcgccaagttctccatgcccatttaacataaatgaatgtgtaggtttacttttaagacatgaaaatgtgtcataaaaagcattattttaaaaaccaaagcccatgcattgagcctactatattcatctaaagtaattttctcagactttcaagagagaaacagattgatgtacttttggggttgttaactagtggcttttcaataaagcctgagtatattgatgattttgtttttcacttaccttttaaaatttatacaatttaagtaccatcactggtatggcagtaaaaaataaaatataaaaatagacagctccataatttggcctttaaatggcttcacatatttatattctatgtaggatatgtaacagattgtgacaacagaatcagatataatcaaattgcagccttacaaatatagcaaatatcatgaaacagctcccttctgctgactcaaagagtgggagtttcatttctttcattatattttttctgtaacagcttatcactagcaacacctttggagcatttctccttctttgtcagtgtaaatgtccacacaatagcgctttacctatatttgccatcaattttctcacattggattttctactctggagacaactaatttgagtaactggaaatataaagcctatggcttccaccttcagtttcccagttcacagagcaatatagaaagtcacttccagatgcagaaagcccaaggcccacccatagactttgttcagcctccgtggtgctccttagcttatttctctaaagcctgcagattttcatatgtggtatttggggaaaatcttattatcaatatataagcatcactacaattaagctctgcttgttgtgatgtctgaatatcaataaggactccagttcatcctgagagtgacagccatttaattcactctgcctgtctaatcttgggcaaggatttaaaagatgctgtcaaatatttgtaaacatgtcgtgcatttttctttcacagagattcttttaaagtgagaagagttattttctgttttgtcttggattattgtttggtttttaaaagctcatttagcttttcctcttctttaatagtaaattgcaattttttttccccctaagactcacaggagctatccttcactgtattcatgaagtgggagtagtgctgtaccagtagggggcgctcatatcatacctattttgtgggttggcgaaaagtaaattttgtaggtttgtgtagttaagggtggagctattttaactctaaagccaacaaagattatgagttggaatagaagttatttccccctgttgaaaagttaaactttgctaaagttgtaaatcttcactatggtacgagtttaagtggcttttggttaatgaaactgcatgctgtggttgatgttttcagatagcttaatgtggagaatttaaaacatattaaaagacttttttcctgataggtattatcaaattttttaatccataaataacagacacagcacactcacccctgattttaaggggtttctcatatttgtttcatggctgtaatttcatgtaaacatggctgatggtgatgtgagtagcaatggacatagagttcaacttgtttttctggtaagtgtctcctaagtaagtttactttggggtcatttgccttcttcattacattggcatcaagtgtagtcccaaaggcatcaagatcatgattagctaactttcaccaacatcagtaaggaagcagcctgaggcatccttctattcctttttcttcttcaaggttgttatgtttgtcctttgagttgtcagcacccttcaaaacgctctctgtaattttagaacctttaatatggtgaacatcaagcatctcatcatgccaaatgtaattttccacacccccagcatttaatgtgttcacaggaaatgaaaaaagaatcacacttcctctctttgcttgttccttatgctttatcgaacaccattttaatgccaggcacagagtgagagaccagagattaaaaaataaaagatgaacagggcttatcactgcccacaacaaactcatgatctaggcaacacattattttgtgtactggggaaaggatggctccaaagcctgttttctttaacagaagaaaaggacacagttgtctccagactggtccacatgtttaactttcacatcgttcctgactcaagcaagttgactaattgcttacactatacatcccaaaattgaaagtctttaaatttggaagtgcattatgcctgcctttagatggacatggcttatggattcacttatgtcatacaattttcttgcaaactactatgctgtttcaggccggtgaggtggctcatgcctgtaatcccaacactttgggaggccgaggagggcagaccacttgaagtcaggagttcaagaccagcctggccaacatggtgaaaccctgctaatgaaaacacaaaaattagctctgcatggtggtgggtgcctgtaatcccagctactagggagaatcgcttgaacacggaaggcggaggttgcactgagccaagatcacgccactgtactccagcctgggtgacagagcaagaccctgtctcaaaaaaataaaaataaattaatatgctgtttcataggttgaatctgcttggacgctggtatgcaaacgggagggggcaaggggagaggaataggagatgacatgggaagatgagactgggagacggtaaagtgtccccacttccttagggtgagctccacaactgtctagcaattctctagcaataaaatggctgtcctaagattgataagcctttagcgtggcagagtgatgactctagactctcggatttaaagatctctttacttcacacaaggtctctttttctcctctctttcctctacataaactttcttctctgtcagcattactgctgcctattgcatccagtttactataatgcataattaccatgccatcattgctgctgcaaatgcctttttctctgttctttctgcacatccttttccatttatcttatatttcctgttttggaaatgtaagatacatctatatacatcatggtgcctttgtaatgttaaatgtatttttttctaaagaaggtcccctaaattgcaaaagctcaggctccacagagacttagatcagtctctgcccatgggttttaatattcaaatctttggctcaccttccagttgccttgttgtttttgttgctgctgctgcttttgtgttatgattctgtaggtaaattgtttgtagggcttgttcttttcttaatgaatatttttaatatctttttttctcccaggcagtttcttagtccagagttgtgccagaagccaaattttctaatagagcttaatggattcttcgacaattcttgtaaaatatggtatcttaaacatctatcactaaagtggatattacagtacagatattgcaaaaatgtgtttaacagggtacatagaatttctgccaaaccaaatgttgatacacagtattaataggactcacccagcaacttatatttcagccttcacattgactttgataccaaattctttttgaaatctattgagtactctctcaatttcacccaacttggcctcccctccccaaacacacatatttgctccacctaagaggcctaagtctctcaaaattttagaaggcagtcaaacaagatgccctttttccaggcagtaatatcacaatagaaaacatcttctgaatactaaacctctggcagcaatagagtctattcatttcgttgccaaaggaaatggtaacccagtaattatcactggccctattacttcttctcattagcccttgtctcacacaaagcagaagttcaagttcttggttcagactttgagatttccaaagaactggtttggcaaatgacttttatttcttgatcaacattttgtgtatcaggcccctattcaggttctgcaactagagaagtgaacagacaatatttgtgctagcatggcaataagttttgctgaagcagggcaatgaggtgggaaatattaagggatggaagaagactgtttaattatctagaacacttccttgaaatagattaacaagctttcaataccaagcagttagggtaagccattgctcaaagggactactatgacagttttttgtattaccaaattttattagatgttaagtccatacagaggttgaactatatacaatggcagtaaactgaatatgaagtcattaaaaattaagtttcatgctattcttttgggtgtcatgacagtagcaaaactagcgcattcagttcccagaatcacagcttcatcataaagatgagtcatgttgaactaaagggactatattttaatgagccaatctggttactgtagctcatctatgctcagcagcagactgcctggggaacaggagacaatctatttgtcaaatgaagaattagtccctgatgctatccttcggccttgatccccccctcaacactctcctctctgttccttcttgtataaagtcttgccttgggggtttcccttaactacaaataacggtagcataaaacaatctgcattgtgcctgcgattccccatttagcatttgttgacaaataagagtcatcaaatatttattatttatctacaatgcttttagcactgtggggttacaaaataatctttatagaataatctcttggccttgaggaggagtttatagtcctttgagagagtgaaaacctccatacatggaacttcagatcagaaggtatggtctgtagtcattcagaaaaaaatgatcgctcgaccctatgttaggtagtcaatagggagaaccttagaaaggagttgggacatgagttaaacattaaagaatagtttaggtgttgaataatttggcatttttatcattttccgatttgctctctttttaaattcatgtactaaagatttcctattgacaagcatacgatgcacaattatttttattcctgatttcagtggatcattctgtgagttgctgtggttgtttttctagctttaggagaggattaataccttgaatccttacttgtaagtctcaccagcactagaggttttaaagtgtggagtaataacatctaatgtaagggaactagagtggagacaaaaacataggggaaatgctaattttcagtagtcagtgtaaccatgggtaatttttacatgggtttgtgatattctgatgtaaatgctttaaagtagattttgaatatattattttctactgaatatcgcatagtgttattttaaaatttattaggaaataccaactctgtgccaagtaatgaacattactgatggctaaaatgcttggctagcatcagatctgtctagctttattaaaaataataaatctagatttacaaagttcttgacacacaatatatcagagatataatctcaaaaatgtatatccaaataagttctgtcctttaaatttggtcctctatgaaatgataatcatatctgaacagtaataccatcattccatagattttttaagtctgtgtttcagtctttcttaaagtgccagtagacggctgtacagataaatttcttacattattgtgaaattcacatttttatgaagatggtattgcccctgcttgatcatctgcttcataaattcacataacaaacattttgcatggtactcatactgtgccagggaggcaaaaataaatttggcgtggatcctgcctctaaggattgtaccactagtagactaaaacaggtaagaacttggcaaacgaacaaggaaaaggccatttgagataaaggaaacgcacatgaagacatggaagtgcggaacagcatggcattttcagggaacaacagatggtttggcatgactagaatatgaaatgcaaggagagaaagggcgcaggtgatgctttaaaaagtcattttaagctagacaatgaagattttttaacacttaaaataatttcctattatcaaagattttatcttttttaccatagcctggaataaagttatagtgggcttttcaggtatacttttattaaaatttgagggaatagggacggtagaaacaaataaataagcttagaagtgccatacgtggtgtcaaagtgatgtcttgctttcacattaaaaataaatatatatttacaaacttcttgacatatgatatattggagacatcatttcagaaacgtatatccaaataagtgttacacttcttgtgagctattttgttttttagtcacaataattaagaaaaccacagagtacagaaactaacttttatgtgtttttattaagctttaatacttatatacattaacttatttaagatatatataacaatctaagtaatacgcatttctcttcctattttacagatgagaaaactaagattcagagtaaaaaaagtggcctaagatgtccaggttactaagagacaaaatcaatattcaaacagatatgtttggcaacaaagttaatagtttatactgtgttgccactttacctcagtcagactttatctataccatatttgggtttgaacaccttctgttctaaagaaattttaaagttttcgttaaactgtcccaaatgtcaggtaggaaaagttgacactgatttccctaaatcacaatattcatattaaatattctggaggttgccagggaagaatttcatagctatcttatctacaccatcctatacaaactgcatcttggtccattaatcctcaaattatgttaaagaaaaattgggactattatacaatctctaagtgatagtaggctctcaaatgtgactttaagaacatatgttaacctctctcgaccttaattcttcatctctaaaaggaacagtttagactaataatcccagtgatccttctgcgtggtctcaggattctgtgctcactgcaaaataaatagcatttcagtctgtagatacggtatatgctggcttacaggtgagagagacactttaagtgtgattattttataaccgccaaattcggaatcggatttgagagctgggatttttgtgtttatttttaagaactctcatggcctacatatttctggcatatgtaaaatttgttactggtgatataccctgtttataaacagaaacttgttctttaaagacaaggtaccaatgtgcttaatttttaaatcaatagaaataaactaatcaagaatacccatcaactgcattgtggagtggttgttgtatgaggaggcagtagggtataaggattaaggacccagactctgggtttgaatactggaaatgccacttcttcctaactgtggaactttaggcacattaatgctgttctctgtggcttagttttctcatctgtaaaaacaacttctgcctcatagagttgttttgaggattaaatgtattcatgtatgtgtagtacctagaacagtatccggtacatataaacattcatgaaatgttacctgttgttagcattatggataagagatcacttatttgaattaaagaagctacagaattaatggataaaataaaaatattgaaggtaagctgcaagagggcagaggtttttgtctgttttccatatctgtttcctgggcaccagcctaagtatctggcttagattaagtgcccaacatatatttgttgagtgaatagttcaagattcaatgacgttgaaacctctattatcttgttttttttttttcaaatgttcctctgtattttaatgtttcttgtattcaagagcattaagccatatgctataaattctataacataatgagtagtaagtaacagctttggtctctagattcctgtttcagttcctctgtgctattttaagcagaaataccataaaatcttagataatttcttataaaaacaagtgttaggcctcatcttttttcttctttttttgacaagtaaataaaaccaggcctctgcttatttagacatttcatgggtcttggcagttctctttgttgtagcagtagctgtattgatccagctgttgcagttgctacttgggcagctgctgggcagcattgccaactgcctcagatggtttttaaactgattttagagagaaaaacaatccaggaattccagaaatacagctaagcctcccctctctcttgtccaattagcagctatggcttagaaccatggattccaaatacagcaatcctactcttttggatacaaactaatgcctatcttgaagagtctaagttggataaaaatctcaccctcagtctcagttttagtaataatactttagaattacagttactgtaagccaagtgtttataaggattttcataatctgtatcttattttacttaaaaacccacgctttcttctctttactctttcccagatagacatagttcctgagtcactgttgattagccaaagtgacaaggatagccactttagttaatgaaactaaattatttctcccaaaactaaattatttctcccaataggctctcggtcaaaatcatgctgatatataaggtgctttccagctttgtactatcttaaatattttattgttgtctaaatgattttgttccaaccataagcttggaaaacaagaaaattgtatagtacaacaccaaaacctaataattgtcaccacagggtgcattggccaatgggaggaaactttgccttttttattttttttaacagaaagaaatatcgatatccaacttaaagttcccaggaagggtatgaaaatttcgcataaagatcttataagttttatagaaggagagaagctgaaaacccatttagacctattctgcccaaaatgcagtggtacagaaacctgtcaaagtgggggaatgtactttccaaagaccagggatgagaagcaggcaagaagccctcaaaaatcagctgcatgaagatggtggttgcaatatcaccagcctcataagaatatgtatatgtttcaattccattgtggaggtggaatctaagcacaaacagtcccttggcgatcacctgaacagtctccagagaaaagagagaaaagaacgtacctgctataagcattatggaagcttttataatttagaaggattattaaaaagagatgctactttatgtgttatcccaaaataaatgaaataagtgataaaattcattaaggttgatacaaagttctgtctgtggtccttattggagacacaagcaccaaagtagtttctaaatagaagctctccactgtttttgatttgtggaatttgaggagtgaatgccagtcatggctaagtcagaaatttaacttagcatgcttactgtaccaatgtagaaagtatacatgttatcattatgtccatgcttactcaaaccacatcctcaatcagagcgtcctctctcttatacaaagctctatcacacaccaaccctgaactattcactagagagagttgtacccagtgttacatattatttagtgtctctcctccccacaaacatacaccacttctggatgaggaaggtcataagtcctggttctaaatactgaagtgtaacattgccaagtgtaacatttcccctatagtcttggactcctctaatcataggaacccaagggaaccactggaagcacaaagataatccttccccattttcaaaagcagccatgtcactaatcagaaactggttaatggaattagcattgcatttaacttcctctgccttcaaatttaatatacaagcactgttttgtattcacccttcccccaaccatgtaagaatttaagctagttttgatagaattttctctcaaaatgaaaaagcgattttatgtttatttaatgattgaacctgtgccagccattctggtgcgttcccaagtaggcatcagccatctcatccctatttgagtagcatcagcactttcatccctattcgagtatagagtattttgagcattacaatgtacgtcagcatctgtgacagatcagcatctttcaaaacagaaaacaatgtagacagcctgtaatatgcttttcataccacaggtgttgatttctgccccaggaaatataagaatggcacatcaacagatattacccatcatgagttgtgtctgagtgttgattttaaatagtctaattaaaatgtcccatggttggcaaaatatttgatgatcagcttgcacaatagttgttgctctatcacaaacagggtaaagttgaccctggtacctgatcattggctgccatcagtgaatctgcacaaaatggagatgcatctacaagtaagaattggggaattggctactcatcaataaattggtaggtatgaaatgggtatatatgctaggaaagaagcacagtgggaagttagatgcaaagtcatctgtggaaataattataaatccataatttttaaaaaaataccagtattcaggtatatcatgctgtataaaatgcagtgagattatttataagggctaatattaaaaagtatagaaaaatataatttggtttagattcttaatatctataacctacttcttttaaaaggtctagtatatattttaagcaaataaactaactcttagatttattaaaaagagtaataattcttaatttaatagtaaatattaaatatttaaaatatttaaatataggctctgtactgaccattgaagaattttcttaaatttaacatttccaatcagtttaaattatacaccaaattaactaatatcttcatgcataaaagtctcagttttaaggttgtaatggaacctgacttgaccagttcatccttatggtacatgctgataaatccactaaagtagggttttgattaaatatattctgagaatggttgtctttggttattataatagttagaaaacagttctcagccttcatcaacctgttaaaattagtggcctgtaggttattccaacatagttcttttgtatgtactagacaaatacagttgttagttgaaataatgccaatattataaatggatcaaatgactctgggttgattaaataattgtcttttttctaatctataatctgtgctcacttttattaaaatagattcatagcaactatctgctgtgtgcgggtaccatactagctaccttcatagacgttatgttttacagtctttaaaacgtgaataagaagttttgcatctgataaatgtgactgtgcccccttggggccactcattacttttactgcagcatcaaatccttttttttcatgaccctattatatcatataatgtcctggtctctttcttgcttaactaccttccatgaggtcagaaatgattacaacagcaatcatattaggtaattttagtgcctatgaaacaagctaaagagaaatctctgatttggtgaattgaaaaccatatagatatggggatgaagagttcctatgactgattttcctatctggattcaaaccttgcatttagtataatatttacaatacaaaagacaagccttcactgtcacccacagtcacaccagtgttgttctcagctggacagtatggattacttgagttatgcatgagataaaaattggcagccatccttgtgctctcagctcttggttatgcatgaatgcattattcttttgtgggtaacacattcatctccggattaccacctcataattgctgttatgggacctcaagccctcttcctccctgaatacttccccaaccactctagaagccactaaggacatgactcacaaggttcctgaacaattacccttagccaacatggaacatctgccattttcctcccctgcagcccaactctcttttgtcatattgcttagttagccaggtgcatgcccactagtaatgcaatcacaacccacttatgttgccacctgtaggctctcccaagatgagactatttaaacatctcatcactaaaactcctctgcaaaaatgttgagaatgtcttcttcccatcatgttagactctctcatgatagtccttgcagggtgggccttctgagtgtcagagaaaagtttgagaacaatttacttctctggttcctgtttacacttctagtctgggggactaaacttggaaatttacctcaaaattctaaccatcacgctcttgatagtcactggttaaaaaaacaaacaaataaacaaacaaaagcaaactcgtctttcccaattttcccttagagtttcttaatcaacatagttgctcttagattcaggttcagacatctccaaatgaacatgtgaaaatgcaactcttgatttttctaaacagttatacatactacagccatggtgatcatcttaaaacagtagcagaccaatggttctcaaaagttactagatattagaattatgtggagagtttttaaaaagtaactgatgcccatattcttaaccaagtgtattagtttgttttcacactgctataaagacatacttgagacagggtaatttataaataaaagaggtttaattaactcacagttcctcatggctggggaggcctcaggaaacttacaatcatggtggaaggggaagaggcatgtcttacatggtagcagatgagagagagtgagcaagattgaggaaaactgccttataaaaccatcagatcttatgagaactcactcactattttgagaacagcatgggggaaaatgcccccatgatccaatcacctcccatatggtacctccctcgacacatggggattatagggattacaattcgagatgagatttgagtggggacacagaaccaaaccatatcaccaaagtaatgaatcctttctaagggagaaaaactcatatgaaatgtgtgacccacctcatctccaaccacagagaatgaaaaatgtaaacttgacatgctaaactcaaacttttcaaagacaaagaagaggctgggaggagaaatgtactagggtggaaattctggctcccatcctccatttgttccctgagaagttagaactgaatgtaaaaaaaaaaaaaaaacatgaagtgtcctctgcttggacctaggagtatgtgctttggaagcactcttgatgcctcaagtatgagacactttaggaaaagtaacccaaaccagaagagaactgatagtggaataaagaacataggatgtagtgcagggcctggatgcacctgttctatgcattactgcagagttgtgcactaaagcatccaccaaaaacatccctgattttagtttctgttccttaggtttgtttcttaacattgtaaaaagcattcaactggacagtgttgggctgagcggtgaatgtttctccaagattgtagatcaaggcttgatacaagtgaattgtgaaacaccccacactggcccatattgttaggggcatggctgacatctggctactaacagtttccttctgttcttttgtcaacgtcagcctgattattttaataacaattcttgtgtgtcactatccttgtttgtatatttttttagaggaatatggtaactaagtttccgttgaggaaaaatacaaatttaaaaaatctaaaacatcttgtgtgttttatttgttcacttgttagttatattttaattaattttaaaatgatgtatataaatgaacaagatatgtctcaaaaatcacaagtggaacttattaatatcagttctaaatagtgcctggcaacaaaacattggtttccagagccttacaaagaattgctgtataatgggccttctaaactaatgttagatagaagttgcacttaataaagttactgagatattaaattattatagttgaaagttagccaggaagttatataatattttgccttcatggaattgtgtgtttaacaataaacaagtcaatcccttcatcaagaaattgtatgaaaatatgtaatggtacgtgtaagatagacttcttattacactcttctgtctttagaatgtgtgactccaacatatttcatcacaggttatttactgttcttaaggcagacagtagtataaccattactatcattaccataagctttaatttagagctcatgtgcatagtgtaagtgtgaaaaaattcacaaactaagtttatactctgaacttcatatttaaggcagcttttctattaaatgtacatctaatattccctttccatgttctgagttcaaagctccattgcttcaaatattaaaaatcccccagaagtctttaatcagcacagctctcctatagaagagatccaaatgaaatttgaagaatagaaaaagcataattggagctattttttcaattccttcttcctcccccctcactatgcttgtctctctcattcttgtatacacacccactcgtacatatttttggaggcagaagagcactgcttgctttttgtgcaaatgaaatagcaaaagaaaacatgttgctgtgaagctgaaatacactcatcagactaccaagtgcttctagagaaagctttcactgaacgtcattctgagggacgcagctcccttcctcttgaggccctaggcatgaaccatccgacttcccaatccaacaaaacctatcagacaatgaacagcagttgaatgcaaaattaaaggcctgaatattgtagtcactaagtgattggtagcttgtgactgagggaaatggggaaaaaataagccattctcttgtttcttctcgcctctctttgtggttttcttgtcattctaaaaatgctgaaaatgctgtgggacttagggacctcctggacacagaagatagtctaaaaatacatttgtttaaaaatttaaaaaaaattccactttagaatttgtcttcttttgaggtaatctgttacacaaggctgctataatttggctttcagcagtaacaactagttatgccaaaaatgaatcgtaaataaagtctagacaaatgcagtgtttttattccagaggcagccagcagatgctttgtgtaacctgcactctcctgctggccagattaattttgcactatgcttttactgtgtaatgccttggaacaaaacaaatttaaaatgtgtcctttggccacttggacttcctcagatcactcactgtagcattcttcaatattaacgaagagtaaacagtttaagggccttctgatagtcaatgacatatcacacagccctacttaggccaaggagttcacaagcaaagtaataagtactccagagatgttcttcagttgtcaaaattctgtagcatgtcaagtgtggaaagaaggacaaggaagaggaatgcaaacctaggggaacagaaatctcaactttctccatggactgtcgatcaagtatatcattataatatctgaaaaccttgcctttcccttctgtgatagtcatattattgtggaaaatatgaaacctttcagatccaacactttctcttcaaaatgcatgttatatttgaacaaacaacactgctgcttttctaaatggattagtaacaggatcttaaaaaccaggctttttctttttgagtgaaccagtgtatcactgctgaggaaaagagcagaaaggttagtggagcttgtccttgaaatatagcccaaattgatactctgtgcaacctaaatgtaagcattagctgcagtgattgtgggacacatgattgagctttccactcattacaagcaattctcctaagctcaatagacagactttccttaattgaggaacaggcattaccaatgaatttttatgagtttattcattctagaattgttcatcataatgcagtcagtttattatattaaaaatatatatcacaactgaagcagttttgtaaaacagacgttaatacactactgtatctatttatttgtaccttggggatataagggggaaaaaaagcaaactgcatgctgcatgaaaaatcatagccatccaatagctaatggctatcatgttgaaagtcaagtaaatgcttccactgagccccagtcaaatgtttggggttgattatagtaagatgaaagggttagttgaaattgcaagtagatgtagcacaattgggtattaattttttttaacgtttgttgaaaatggaaaccatcattctcagcaaactgtcacaaggacaaaaaaccaaacactgcatgttctcactcataggtgggaattgaacaatgagaacacttggacacagtaaggggaacatcacacaccggggcctgttgtggggtggggggagtggggagggatagcattaggagatatacctaacgtaaatgacgagttaatgggtgcagcacaccaacatggcacatgtatacatatgtaacaaacctgcacattatgcacatgtaccctaaaacttaaagtataataaaaaaaagagaaaataaaacataaaggaagataactgaagtgtattgtttatcattataagtggactactgtctgctacttctagctcactgtgtctatctgaatttatatatacccactgtgatttaatcttcagtttaactagtagatgccagtccatattttcactatatctacaagagttcctgtttcttcttatgactactcatatcaataattctggaaaggggagtcttaaaagccacttaaaaagaagagtgacccaagaaagcagaaggctaaagtaaagtgcagttgtcatctatttatagactgagtattttaattatgccttttaatgtattactatggttaaaaataaaagctgtgtatgaagtcttgaaaactaaaactgaaatgtttatgttttattatagttacaatttttcctttgaactttccaaataaaaaattcccctgcagactcatagacaaccagtattgcttagcttacgctgtaagcctgtaaatggggaaaattgttcaagagtgtaatcactaagccatgaatatggctctgggtgctcttatgcaagtttctctggccagtatttttatgtatggtttgttggaatatattttttcttttcttagatttaaaagagttgttagaaaatgtgcaattggagaataacttacacacacacacatacacacacactataggctgtttctatgggcctctataaagcttacaaattcagaaaataggatattcacattctctcaatgaatcagaaatgtagcagttcacatgactaagctgatgactaagcagacacttggggagaagagcttgcaaattgggctttagggaaaatgctgtcattagactctaaaaatctaaaataattatcacttaaagccaatgtgaaaaattaattacaatatttttaggtcattaatttttctagtctcagatctcttcctcccctccacacccatttcctggcatattttaatctagcccaatatttaaaataaatcaaatgtcagaggaactctttaaaaatcaaacctggagtttctgtcagttctttttccacaatgtttttattggccagtagcctatgttctgagaataatccattttctcctaactagaaagacttttaaaaaattttttgcagttgtcatagagatggaacctagcatggtggcaggatgtcagttattttgtcttttgtgatatttatatttttgtgaatatttttatggtgttttttttcctgcctgcatgaggtgattctcctgcctgtcttgtgatagtaaacacaggagtaaacgtgctctatttcctcacctgctaacatttgagtgtgatatgcttagttaatcagttcactgaagcaattaagttgcttttcagttttttttctttttgtgtcttcaaaagggcttcatcttctggaagtgccacattgacatggtaagaacaagtttatatggtgcttgcaagatgttgctcactattctaagttctataagtagaataaaacattgaatcattgtggcaaccctaaaatataccgatgaaaactgaggcacagagaagttaaataactttcccaagactgcgtgcctagtaagttgacagtacagtatttaaagtgagtaatctgtgcctagaatctgtgaccttagccatgactctgttcttctcacacagaaatttactcatgttttttcaattatgcagaagagccatccccaaaagattatttaagatgaatgctttgtcattttttttatcatgtagtggacatactttcaaaacgttacattgtattaattaaaatctctgattcctagtataatatagacttttaattccttgctactgccaaggaattgcttacttgaaataaaattttacttaaaaatgggtactctgtgttaccatatacttctatattgctgtctcttttcagctcagcattttactgtaaaaagaaatgcacacatatttaaaagttcttatatacaatgaagattcgtgacattcgttactgaatttatagaatacataatcagaattttataaacacaagtatgtattttctaatgataatgttgcaaaattagttacttttcaaaggaatcaagatcaaatttcttgtacttaataaagttaataagtaattaataatgtaagatattgttatataatttagtgttccttgtgtactaggactagcgctatataatatgcatatttacatccttagaaaattttgtttttctgttaaaaatgtatgttcagttttccccaaaatgggaaaatatctcagaataaaatacctatttgtttcaagtatatcaacaaataatgtttactcaaaaatctcccagatttgtatttttttgaaaatgttagaaaactcccaaatcttacattaaattagttatgatttggcctttaatcactttaatcattttatcagaagagttgaagtctactaagtcaagttagatatgatcccactagtgactgtaactttgtatgttaaaccacctgttctcagcatgtacaggaacattatcttctgtttgaaaaaggtaacataaaaaacttaataaaagccaaacaaccctgcacttgttgttattacatttaaataagttatttaaccttttgtcatttgcttttgctcattcaggaacaagatttaaagtactatcagatgaatgttaaaacgtacttgcacacacattaatttagccaattctatggttgtctacaaaataaaggacagaataaagctagacaattcagtaaaaatattgctggataagggctaggtaagctaaaattgctaaagatggctcctatctctgctctaacattattggacaaatagagcgtgatacttagagatgggtatgggatgagtatgagtctggatgagactagaagatgaaaagcagtagaatcaaaatttttaaagcatcagataaatctatttacctgttctccaatatcatgcccttggcaatgaggaaaaattaatctttcatactaatcattaaaataaagaaaaaggaggtaaaaacttcccaggtgatatttgagaaatgaaatcagaaaatggggagagtgatggtgatggcgacgatgtgggaaggactgtgggctcttaggaataagttatccttgttgtctttcaagtacttgaacgcagatttcaaaaaatagaaattatgtttttcttaccacataaatgaagacttatgattttgtaagtgttttgatatccaccacagttttaaaataacccagtaatacttgcagtgttatttttgtagtgtaaccacttgtgtgaatgaacacatagctaataaatggttaaatggaataaagactggcctaagagcatgacattatgaagtaaaaagtcaggcaaaaataaaccgctgtatgtgcaaaagattttacattctaaattaaaagtaactattaaaaatatcactgagaagagagtataggtcttatatccttcaaataaaccacttggtaaatgcagggaatgctacaggaaggtgcctctgctactcagaagttaacgaaaatgtgtggttgtcatggggatactcaaattacagaaagaaagaaatcaggaaatgatgaatgtaattaatttttcttgaagttcaactgatgcaaggtaaaagcatatttattatgtgactgtctagccatccatgatattaaaaaaatgaataaataccaaatttgcaatatatgtaaattaggcaaattttgtcatggaagttcacaacaaatacaattatagttactcactgaggaatttaattttttcatatgggtttgcataaataaataaataatttataaatatagaaggctgacttttgttagtttttgcactttttattaggagaaaaattaatcaaagaggatgcaatagcccgcatacaccagaagcaattggtgtgtcaaatttgctgtagtgctgagcagtagaccactctttcagggtagaatttgagcagctttcaaatgcccagttctgctgctaacattaaattagataaacagatcaagattagattagataaatagatcaggcaaataagtgaacaatatagttgttaaaaaaaaattcaggagtagtaggggctggtgagttttacgtagactaaagagctcatgctttgtctaaatgagcagcagcaagttaatttctctaatagttgtcctgcatgaatttgaatccatacatgctagatctgatttttcatgggaagctgaacatgtttccatgaaatatttttctgcaaaacctcctaatttttaaatgtgggcaagtaatatgtttaatcagctagtggaacacaaaagaactactgtcagcaactagtttgggatcttttatagggctttatgtagagttgtccttcataagcaggctaaaaactgatcaattagggatttgttggttggaatctggttggaatcttattacatttccttattcacaggtgtatgaatatgaagcagtccactgtgttagatcagtggtagcttttaataaatgatagcttcttcaatctgtaggtatagtctgcgtttcatagatcccaggtaccaacctaataaaaccttcctatcagtacctgcattccaggccatggatatttttagttaacacttctttatggttcacaagagaattttacataattccagccttccataattcataattccagtccataattccataattccagtcattatgggattccgtaattccataatgtccagtaaaagaattggctaattgctactcccatcgtttgccaatcttcagataaaattttagcatctataacaacgagaaatttgtgtaacttttttataaagattaatgtatatgtactccttcatgggtttagaataagaaaaaaaaatggtgtcatcttcaatgttgaaaaatatgccagatcttcaaaccaaaaggcactacatttggcccactgagaactaatttattcaccaaagtcacctcaatatgccagattgagttctttgcttctaggagaatccaagatttaaatctacatgtaacaaacatatgatacctaacgttcacagagtgccaagaatttacaaactacattttaaaataagatctcattttgatcctagatataatgaaaacacacatcaaactctttcattccctctttgacttcccaaagagggtctttaaaaaatattctaatggattattttcttattttttctgtaaagtctttatcacactgaaaattacagtgtgatacagtggcatatattatcataatgtgataatatatacttgattctatatcattttttagttaaattttcccatataagcctaggaggattgaaggagatgttatttgtaaagagcctcaacctagtgccctggaatatagacagtttgtaataaatacaaatatccttagttgtttcgattttggtcaccttctttctaatacacctgttttgtccaacttatccacttctgccaattcctaaaacataaattcaatcatggtaatttcacactccaacatgtgctgtggatccttcctgcctctaaagatggggcatagctttcaaagccctctctttcatgcttcctctttaccattgtgttttatccaaactaaacaactttctgttcagggtttctcttagcttagtagctttgttaacaatgttcccatctacctggaattattttactaaataataataaaagtcaaatgcatgtttgagacctagctctatgaaatacttctacacttcttttttttttttttttttttcttttttgagacggagtctcactctgtcgcccagcctggagtgcagtggcaaaatctcagctcactgcaacctccgacttttgggctcaaacgattccactgcttcagcctctggagtaactgggattacaggcatgcaccaccatgcccggctaatttttgtatttttagtagagacaggattacaccatgttggccaggctggtctcgaactcctgacctcaactgatccacctgcctcagcctcccagagtgctaggattatagccgtgagccaccgcgcctggccaatatgcttataatattcctacagttctaacagccttcaccttctctggttccaggaccctctcggttcttagaggacatacctataagttttgagccttaaaattaatggagtacataccttagctccattataagatcataagcatatttaggataaagactccatcccactcacttttgtatacccagaaaggggtaaaatgcttttcacatagtaaatgctccataaatagttattgaattaacttggcagaaactataggagccattgaccagcttcctgccctattcagaaatcaactctacatcattccccctgtcctgcctgtggctaaaatacgtgcaagctcatgacttcatgacatggtgtttttccttgttgaaaaattgaaattattagaaaattttcttgttttgagctgaaatattctttccacttcactcttacctctgcctgtggaattggagtactatttttttttcttctacatgccaatccttgaaatgttgatacggtgctcaccctcagcattctcttatcatggtgaacctcaccgacctttcacccccacgttgtgttttttttatatggctccattctggtcatcctctttttaaatgctgctcattcttatcagtctatttctttcaatgtggaacccagaactgagcagaatactgtgtgaatgatctgaccagtacagaatgtggtagaaatatcatctccctcggtgcggacaccacattcctataattcagcctacaactttagcagccagattatgtggttagctcatagtgagcttcaacaaataatgatttaatgagtgcctgtatctgccaggcaccataaggaccctccacatgttatctcagtaaagtttataaagctcgattaaaactcccatgttcttgtcaaacaaattgctgtcaagaaaacatcttctgtcctcaatgtgtataattgtcatctcaacacaaatctaagatttttcatttatctcagttaaattttattattttggtattgtctcatcccttatcccagttaaatttcattatgctggctttgcctcatccctttaacctgtcaagatcatttaaaattctgtgtctggtgtcaaagatagcagtcagttttttccagctttgagtcaactaccttgttgataaggaagccatttagttttcagctaagacgttgctgaaaaaagaaaaaaagtgttgaactgaatggagcagagccaaggatgaaagctacctctctagactccttcctacagatttacaattagaatccctaaagtagggctcttctatagctacaaattcattaaagattctagcattcaacccacattctccatcatagttaaagggagcagcatgagcatttttaaagtgtgatttatataatgatagacctcatgaaataatgagattcgtttggcatgcagcatgctcaccacttactagaagttccaaactactagtttggcaaaactttttatgaaattgtccagggttgaataacagtctcataaatctttggattctatactttgacttttatccatttttgaaaattggtcatttgttcatctctgatcttgtgggatttactctgttcaccatcatttcccagtgattacccagaatgatttgtttcacctttcaaatgtaattcatcagtgtttggactgctacattcatttaaacagacaaaatgctctcataatctttgctcttattttgtgcttcaattacctcttgatggtgctgtccttcctaatgtgaaaataattttcccagtggagagaaataaaagcaaaccaccattttaccacatttaacaatatatcattgttcccaagcgatgattatattcatcacttttaaagtctcatttactccaaaaacagtatttatatcacatatacacatattttatgcgaagacttctttaatgtcccttagtaaaggtaagaagtgacaatttcagccacttggtccttttcttaaagattattgtttctcttttgtattcaaccttggttatatgttcttcccttcatatgttgtacacgttttgtttaaatcagagctcatcagaaagagagccctaagcaactatgatggtttccttggatacagattctttatttttctcatcgatatcatttgtgattgtattaccagattttcaatttttactttccatctcctttatattttctgcccattgaaccccccagggagaaaataatagctgttgattcttaaattgtttttcaatggaattacctaaaacctaaggtgtactttagtagccttttcttgacctctaaaatgtcatggatgctttctctataagtttccattatttcagattcaggaataagctcctctttgctgctaaagattaaatcaagaatagaaacttcagaatgagaaactcccttccttgttctgtcttcaatctgaggaatgctgtttcatcaagatagcacaataatttcaaatgctttctattaggagaaggagttgtcgagttacatgcccaggtggttgagatttccccgaaattgctactttcaccactttatgatttgtgtaatgcaacatcagcatcatatgtgtacttattagaaaagtgaattcagggcctcagaccggacctatggggtgagaagctttggaggtggatctcaacaatctgtgtgttagcaagtccttgagataattctccttctcactaaagtttgagaagcactattgtaaagcatcatccctacattctgagtgggaagcaatgcaatgtattatcccttagccacttacgttggctcagatatctgtaccgatgtcacaattttctaagcagatgcacatataccatacatgcagtattcttgccttttctatggacatgcttcttttgaacagagtcttctatattacacagttgcatcctaacacattgtagtaactgtaagatattgaacttctaatgttaagttgccagtgtttcaaaaatatattactcaggaggctgggcgcagtggctcatgcctgtaatcccagcactttgggaggccaaggcaggcagatcacctggggtcaggagtttgagaccagcctggccaatatgctgaaaccccatttctactaaaaatacaaaaattagctgggtgtggtggcgcatgcctataatcccaggaggggattacaggagtgcctcaggagtctgaggcaggagaataacttgaactgtgggggtggaggttgcagtgagcctagatcgcaccactgcactccagcatgggtcacagagtgagactccctctcaaaatatatatatatatttgtatatattacatatatatataaatagattacatatattatatatataagtagatatatagatagatgtattttactcaggctcagtgtataggtatgcagatatctgaggcctttcctatagtctgactcattcaagattgttttgcctgagaacttcttggcaccctctccactattggtcttgccagatgataccaaccacctatgcctgctctccttgctcccaaactcctctcactctgatccattcttctgtaagtcgacctaaaatacagccctaatgatggcatttccttgctggaaactctgctgatttttaactcctcacactggcatatgaggctctctgtaatgttacttcaaccatcctctccgcactttcatttcatgactgcctactttgtagcacactctccaattcaatgggatgggaatgtgtgttgtgccctggacttttctgccccaggccttttttcattctcttccatcctttcagcaggccatttaccttcacttcccctgttaaaatctttcacttcacatctcttgggtaccccaccctcacgaatcctttttaatgtaacttagttaagtgtcattcatcttgcctcctctccctctggtaagcaccaaaggagcacagaaagttatgcttgatgtgcctgattacacaccacttcttacaatatgcgattagggacttatccctctgttaaaaagggacatggatatatcctttatccttaacggtatctgttgaatggaagtaaatatgatgctgtaaaaattcatttaatcatttcttctctttccttttccccctcctaaaattttgtcaaatgatgtagttaatttcaaagtgcctaagtagattataactgccaaattatttgaacttagtgatttaacacaaccatgtgttatcttttagatgaaaggcccctggagtataacgttcttttgataaatctaaagttagttgtttatctttagttagttgttcatgacttatttccaaatggaaacaggtgtcaaatattaatttatgaaacttaatgtttaaaaaaggcataaatgtgtgtggagagagagggaaaggagagagagagcggggagatggaggagaaagagaggaagaagggaaggaatgagaaaaaaagagaagaaataatccgcaaagaatgataaatctacctatgttttggtcataaaggtcttcaatatttctttcctcctcttggtaatactactatacactcaatttaaatggaaacatcacctaatataggaaaagaattattttattctacactaaaatacaggtaagtgctaatttaagaattataaaaaaatgataccatgtatttggacagtatgtcctagagttgagattttatgaatcataaaaaggcaagagataaggaagctgaatctgaaaataggggaaaatacttagcaattaaccttaggatgaaatctctttcttgtcttatcattatcaattcatatttaagtcttaaatggaaaatgacttgtatttaaccttttaagattcagggaaccatttaattgtaattatagctaatccaattaaagatggattataataactgctgaattaataggtcatgaaatactgagtttaattagtagattactatttattttgaaaaaaaggaaaaatactctttcatgcgcgtctgtgtgaagagaccaccaaacaggctttgtgtgagcaacatggctgtttatttcacctgggtgcaggtgggctgagtccgaaaagagagtcagcgaagggagataggggtggggccgttttataggatttgggaaggtaatggaaaattacagtcaaagggggttgttctctggtgggcaggggcgggggtcacaaggtgctcagtgggggagcttctgagccaggagaaggaaattcacagggttaatcactcagttaaggtggggcaggaacaaatcacagtggtggagtgtcatcagttaaggcggggcagggcctcttcacttcttttgtgattcttcagttacttcaggccatctgggtgtatatgtgcaagtcacaggggatgcgatggcttggcttgggctcagaggcctgacattcctgccttcttatattaataagaaaaataaaatagtgttgaagtgttggggcggcgaaaatttttggggggtggtatggagagagaatggacgatgtttctcagggctgcttcaagcgggattaggggcagcatgggaacctcgactgggagacattaagctgaaggaagattttgtggaaaggggtggtattgttgggttgttagaagaaacatttgtcatttagaattattggtgatggcctggatacggttttgtatgaattgaaaaactaaatggaataagagaaggagaaaaacaggtataaaaggtctaagaattgggaggacctaggacatctgattagagagtgcctaaggagattcagcatagtcctgccagcaaagattatttatttacttcaagagttaagagtggccgtttggggatagcacgaggagatatcagctgtgatggcttggagaaacagtgtgaactggcagtgtaaacaagagcagggcatatatgaatagttgagaacggagaataggagtatgactagacagaaaatagtagggatgacaagtttttttgggggcacagtctaagttggtccggtgtctggaatgagactggggcctaataaaaaggagcatctatacaggagcttaaatgggctgtagcttgtagcattctgaggacaggtctgacttctgagaagggaaagtggtaaaagtattgtccagtcatttttaagttggtggctgagcttggtgaggtgtgtttttaatagaccattagtctgtcactgaatactaagagcctgaaaaaatgcttggctgatttgactaataaaggctggtctgttatcagactgtatagaggtgggaaggctaaactgaggaattatgtctgacagaagggaagaaatggctgcggtggccttctcagaccctgtaggaaaggcctctacttatctagtgaaagtgtctacttagactaagaggcattttagtttttgtgactcagggcatgttgagtaaagctaatttgccagtcctgggcaggggcaaagcttcgagcttgaagtgtagggaagggagggggcctgaataatccttgaggagtagtagaatagcagatagaatagcagatggaacactgagaagttatttccttgaggatagatttccacgatggaaaggaaatgagaggttctaagaggcgggctagtggcttgtattatagcatggcctgcctttgctggtgtgtggcgattaggcctggtggaactgccatcaataaatcaagcgtgatcagggtgagaaacagggaagaaggaaatgtggggaaatgggatgaacatcaggtggatcagagagatgcagtcatggggatcaggtgtggtatctggaataatgtgggaggctgtattgaagtccgggccaggaacaatggtaattgtgggacttaacgaagagtgagtacagctgaaggagccagggagcagaaagtatatgcgtcaggtgtgaggaagaaaatagattttggaagttatgagaaatgtagagagtgagttgagcatagtttgtgattttgagggcctctaaaagtattaaagcagtggcagccgctgcacgcagacatgatggctaggctaaaacagtaaggtcaagttgtttggacagaaaggctacagggtggggtactggctcttgtgtaagaattctgactgcactaaccatgcctaggaaggaaaggagttgttgttttgtaagggattgaggtttgggagattaatcggacacgatcagcagggagagcacgtgtgtttttacgagaattatgccgagataggtaacagatgaggatgaaatttgggcttgactgaagtaatggggtctgtctgtgaagccttgcggcagtacagcccaggtaatctgctgagcctgatgggtgtcagggtcagtccaagtgaaagcgaagagaggctgggatgacccgtgcaaaggagtagtaaagaaagcacgtttgagatccagaacagaataacggattgtggagggaggtattgagaataggagagtatatgggtttggcaccatggggtggataggcaaaacaatttagttgataaggcatagatcctgaactaacttgtaaggcttgtctggttttaggacagctaaaatgggggaattgtaaggagagtttataggctttaaaaggccatgctgtagcagacgagtgataacaggttttaatcctttcagagcatgctgtgggatgggatattggcattgagtggggtaagggtgattaggttttaatgagatggtaaggggtgcgtgatcggtcaccaaggaaggagtagaggtatcttatacttgtgggttaaggtggggggatacaagaggaggacgcaaatgaagccttggattctgaagaagggcggcaatgagatgcagctgtagcccaggaatagtcagggaagcagataatttagttaaagtgtctccgcctaataagggaactgggcaggtggggataactaaaaaggagtgcttaaaagagtattgtctaagttggtaccagagttggggagttttaagaggtttagaagcctggccgtcaatacctacaacagttacggaggcaagggcaacaggcccttgaaaagaaggtaatgtggagtgggtagcctccgtattgattaaggggacggacttactttccactgtgagagttactcgaagcttggcgtttgtgatggtctacggggctttcgaggtgatcaggcagcgtcagtcttcagccactaagccgagaaggagtcggtcaaagagccttgggccagaattccaggggctctgggagtggctgccaggtgagttgaacactccgattttcagcgaggtcctgcacagatgggacatggcttggaggaatcctgggctgcaggcattccttgccctggtggtcagatttctggcacttgtagcaagctcctgggggaagcgggcctggaggaacgcctggccgctgcagttcaggcgtttggaagttcttgtgtgctggagatgtggctggggtttgtctcacagtggaggcaaggaattgcaacttttttttttcattattgtacaccttgaaggtgaggttaattaagtcctgttgtggggtttgagggccagaatctattttttggagttttatttaatgtcaggagcagattgggtaataaaatgtatattgagaatgagatggccttttgaccttttagggtctagggctgtaaagcgtctcagggttgctgccgaacgagccatgaactgggctgggtttttatatttgatgaaaaagagcctaaatgctatctgatttgggataaagaaaaaggagcattaacctggactatgcctttggctccagccacctttttaagagtaaattgctgggcaggtgggggagggctagtcacagaacgaaactgtaagccagaccaggtgtgaggaggggaggtgataaaaagattacagggtggaggagcggaggctgaggaagaattggggcctagcttggcctggcgaggaggggagaggtcagatgggtctgtagaaaaggaagattagaaagactcagtgacgcttggggttgggactgaggggacaggcgggagggaaagaaggaagatttgggacgagttgcactgggcacagagactaggaagggactgatgtgtaaaagaatgcctggacgtcaggcacctcagaccatttgcccattttatgacaagaattatttagatcttgtaggatggaaaaattgaaagtgccgttttccggctatttggaactactgtcgagtttgtattggggtcaagcggcattgcacaagaaaataagacgctttgattttaggtcaggtgagagttgaagaggttttaagttcttaagaatacaggctaagggagaaggaggaggaatggaaggtggaagcttgcccatagtgaaggaggcaagcccagggaaaagagtagagacacggagaagggatgggggtttcttgccctccagaaaagcagagaaagtgttggggcacnnnnnnnnnnnnnnnnnnnnnnnnnnnnnnnnnnnnnnnnnnnnnnnnnnnnnnnnnnnnnnnnnnnnnnnnnnnnnnnnnnnnnnnnnnnnnnnnnnnnnnnnnnnnnnnnnnnnnnnnnnnnnnnnnnnnnnnnnnnnnnnnnnnnnnnnnnnnnnnnnnnnnnnnnnnnnnnnnnnnnnnnnnnnnnnnnnnnnnnnnnnnnnnnnnnnnnnnnnnnnnnnnnnnnnnnnnnnnnnnnnnnnnnnnnnnnnnnnnnnnnnnnnnnnnnnnnnnnnnnnnnnnnnnnnnnnnnnnnnnnnnnnnnnnnnnnnnnnnnnnnnnnnnnnnnnnnnnnnnnnnnnnnnnnnnnnnnnnnnnnnnnnnnnnnnnnnnnnnnnnnnnnnnnnnnnnnnnnnnnnnnnnnnnnnnnnnnnnnnnnnnnnnnnnnnnnnnnnnnnnnnnnnnnnnnnnnnnnnnnnnnnnnnnnnnnnnnnnnnnnnnnnnnnnnnnnnnnnnnnnnnnnnnnnnnnnnnnnnnnnnnnnnnnnnnnnnnnnnnnnnnnnnnnnnnnnnnnnnnnnnnnnnnnnnnnnnnnnnnnnnnnnnnnnnnnnnnnnnnnnnnnnnnnnnnnnnnnnnnnnnnnnnnnnnnnnnnnnnnnnnnnnnnnnnnnnnnnnnnnnnnnnnnnnnnnnnnnnnnnnnnnnnnnnnnnnnnnnnnnnnnnnnnnnnnnnnnnnnnnnnnnnnnnnnnnnnnnggacttgctgctaagggtgaaggaccaaggcaggcgtccctgcgtggtctgacacccttgaaacgtgggtgaataatcaggcgtccctgcaatgattaaacaccaagggaaggctgccttcccagtccgtgaccagcgccggagttttggggcaagtaccccaaccccttctctccttgtctctaccccttctctgctttcccaggtttcagcaccaaatttcatgcgtgtccgtgtgaagagaccaccaaacaggctttgtgtgagcaacatggctgtttatttcacctgggtgcaggcgggctgagtctgaaaagagagtcagcgaagggagataggggtggggccgtttcataggatttgggaaggtaatggaaaattacagtcaaagagggttgttctctggtgggcaggggcgggggtcacaaggtgctcagtgggggagcttctgagccaggagaaggaaattcacagggttaatcgctcagttaaggtggggcaggaacaaatcacaatggtggagtgtcatcagtcaaggcggggcagggccttttcacttcttttgtgattcttcagttacttcaggccatctgggtgtatatgtgcaagtcacaggggatgcgatggcttgacttgggctcagaggcctgacatactctttctaaggtattatgtgaaaactctaaaattttcatctaaaaattatggagattgcattattagaagaaagaggagacagaggagaaggaggaggaaggggagaagaaggaaaaaggaacagcatagcatgaaatttaggaaaaaaatctgagttcttacttttatttttttctttagtttaaattattttatatttgcaatcctggaagaagaaataatagtaactgtttaattccttatttcactagacaaattaagattgttaatacgtacgctcacagaacaaaaagtaataattaaatgacagttttagtctttaaaaactacaaatcacagtgcaatacaatctaaatcacttatagacattttgcatctatttgttttatatttagggaaaataatacagttgcagttaaattaagctaagtgacctatgctagggtcaggcgaattatttcaatattcgtctttgttaatttgtttttagaaaaactgcggtaagaaatacaaatgtaaatgactaaaaacaaagacttggcatgacaaataattccacaagtaaaattaaaggactgttttatgatgtatgtactgtagattatgcagtgttgtgggcctcaatcttgcttgctagtcacacaaacatatacaaaggaccttgctcccacagatgtacacatttagtccaaatcctcaaactgggaagtcctggagcaacatcagcaactccctcaccataaatatggcatttccttaattctatgctgcactattttcatatttaatatttctgaaatctggattcatcttagaattgaaatgtaagaatgcatgtggggtcctcaaactcttgttccactgcatggggaatttttcaggttgacataaactaaagtagtattaaaacccatccctctaagagtgtcttttttccttggatggcccaaaaactatgtacatcatggtcagaaaggtatttttctgaggatattgctctttttttttttttctattaaacatgctggtaaaatgtgtcagagtatactgctttctactcttataaaataacccgtgggttatattttcaagatgacaaaagctatttaaatgagatagttagtggacatttttaaaaaactgaaaatcaatccagaatatgtgcttgaggaactctcagggaaccaattcgaagatttgcacgaggatcccaggattcctagtcattttttcagccttgggccatgtaggtacacagaaacataaactggcaccagagctagaatacctaatttaggggccccaggccagggggtgttaagattgctgggtgctcaacactctcctatggggcacccaggcatgtcccagaggaaatgtgtggctactgaaaagtgcactgtggttgtatacatcagatgcacaagtaacacaaaaggcaccacatgtgccacacactggagagttttgctacctccccgggggaagccaaaatgcgccgctgcagcacttggaatgaaaatgcattttctgtgagcaacagcctcctttgaagaaactgctttctctttcaacatttggaagctgcttggcaacccacaatcaaggttttcgttatgttgttttaaacaggcccattatcagtgtctcatctctctgaaagcttcagacttcatcatactgtttttaaagattaacatattatacctgataagcttctaaaacttgcagccttactaaagctgactgttccagcactttcttcctattaaaagtgagttgcacaagaattaaaatagatactgtttgtctactcttttcttgcgataagaaggcaacacttcacttgttctgatgttcattttctatccgtacattcaggaattcatttttaagatgtcctttcttttgtcaaaatgttagatctgtgcaagaatttataaaggaaaatcatttcagacatgtttgtaataggcaatattaaaagtaaatttgaaggctacagtgacttattgcaatattttgtttgtcaatagtctaattagaaactaagaatattcttatattcgactaatgctgatttgttacctcacctgtcaattcttacatagtataaaagtagatttggaaaaactgaaaataaatatatgtatagacattgagcaaaaatagcatttttagcttcttgaaaattgtaggctttatctgtaatggcaaattttaaaaaattgtgacagatgcaatttatttggacctaagtttaatgagtgaaaggctgaacttatgtaaaatactaaaaactacagtgccctaaaatctaaagttgcaatggcaaatcaagattggaaatattaattatcactaccttgcacagtagaattgtgtgacttagggctaagaaaagctacaaaagagcccagaactacatatctcaaaactttaaattaatgggtttccaaagaggagttatgtagcacataaaaattaaaattaagattagaagaatgtaatagtgtaagttgagtagatagaacatttctttcgtagttttaaggatttctgctaagctttgactcattgatagcaagaataacacacaaagtaatattattacttaaaattgtcacgacttattgaactaacttatttaagatttaagctacaaagattgggcctttcagttaacataaaacaaacaaagttacataattgtactgttgctcaatttttgactttagacatagtcagctcatgttcttgtcatgtgttgaagcacaatttttcaacgttagccccaaatcatagttccatgccagcaagtgaggtttccccaaaataaagaggatttctcatccagtttgaacaaaaaatagctacattgttgatttgttgaatgtttttcaaatgcaataatttttacattttggatttagagaagagagaagtaggagagaaggcaggaagggtaacacttaaagacagaagggaaaatattctaacaccattgagtgttcactcagaaaacagcaatgaattacgtggcctgtgatatttaatgagccctgtataatttgctctattattagtcaatatttggctttctgtgagcatttacaaaattataccttgatgaacaataggtcaagtcagtttttccttcttgctgacagagaatcattgaatcttttaaaaattgtcagaggtgatccagatgtcattagtgcactagattctttcatgacttggggaggagccacagactctcatctgtcagaaagcctggtggagggatgagttgcttggcactaataatctcattcatgtacttagtgttacagctgtctaaataagagtgctttactgttcttatattggcacataattaaatatcagttctaagttacatagcaaaacaacaaaattctaaaacccaaagcaaaaattaacttctatattgaaatacttgaattgcctgaagtgggaggaagggcattattttacagcagccaaaacaagcttttgtttgtttgtttgtttgttttgttttgtttttgtagttagaaggcaactccacgtagtgaagaaggacaggttttggagtttaaccaacctaggttttaccaccttgaggaatttaccctgtctctctgagcctcagtttcctaacatgactgtcagagggaacaagatcatgaatgtaaaacatcaaatatcctaagtgttagtcatttctccttctttctagttgcaagtatgccttacttccttcataccaaatgtaattaccatagcagtgtctagaatgtgtcaagttgtgacatgaaacctaaaaaatacagtcagtatctttagtttgggactgacagttttaattgtcatgttttattgttcccttacacatcttgatatttttttctgacatatatcatacaatatctttatacaaatattttaatgtatttgagatatcaaaataatttgtaatattttctgttatgtaacctgtcatcatatagacttggcagatgtattagcaattaaaagcatttccatagaaaagaaatggtaagttattcagactgtacttttccccatcacttcattaattagcacagcatattaaggatctattttatgtagaaagtaatatgcaactaaatgtaatgagcaaagattttaaaatatttcagaaaacggtaattcatggtgcgtattatttttaccactgggttgatacatgtgctttttatctttttcaaatatctgaatcatcaactgaatttttcacttgcatttgagtatatccacttattggtatattttcaaaaaacaaacttttgtttctttaacttttattttaagttctggggtacatgtgcaggatgtgcgggtttgttatataagtaaacgtgtgccgtggacatttgctgcacagatccacccatcacctaggtgttaagcccagcatcattagctattcttcctgatgcttgccctcccgccattcctctgacaggccccagtgtgtcttgtttcccaacatgtgtccacgtcttctcatcattcagctcccacttataattgagaacatgtagtgtttggttttctgttcctgcgatgttagtttgctgaggataacagcttccagctccatccatgtccctgcaaaagacatgatctcatcctttttatagctgcatagtattccatggtgcttatgtaccacattttctttatccagtctatcattgatgggcatttggattgattccatgtctttactattgtgaatagaaacaaacttttattaaacctgctttctcttaaatactttatttttgcttgaatttaaatgaaattagtagttagcttcactttaaatttaaggatattcttgatgatcttaaaaatcaatctgttaaaaagatgtctaagtggaaaaacccaatattattgcttataatacaaagatatttatatttctatatgttttttaaaattatgaaatagtatatttttattagagttgagctgaatgttatttgaactcagagatgaactttatataatagcttaaaaataattgtatgttttacttgtttatcttctccctgtaacgtttattttaagatctcacttctagtttaaaatattcgattagatgtaagataagaagggaaatttcacaaacctttgggacacactggattccaaatgtcttcccatccagctgagaaaacttttaaaaatataattctgttctatataatttcatacaagtgttgttgtttgggatgaggaatggtaatggatcttttgtggtatcctttcccaattaattaatgcctcttttaggagaagtttggtcataagagttttacagagaacataaggctctgctagccaatggaggagagttaattctgggtatacaatagacaagtaattaaaggggacaagaggcaaaacagttttgcggagtgactaatacccactctttccaagggacatggtagaggagcaatgaggacaaattatggaaatgaggcacccttggcttgtgacaaaactctgaaatattggaagaatgtttcctcttagttttatgatcagtatgaattactcctctgtccttaaatgtttaaactccatttgccaggtgtcagccaggaaacccatttttagctgctaatttgtgttttctgtcatctgaaaattttttataagtgtacagtctgtttctctgaggttgaccacataaatttgaaataattgctgatcttatccatccagaagatcctggcagtttcacaactgtataggggatccagatattcctctcaggagtcttaatttgacccagagaaggagcaacgcatccagatccacagaagaaagaatggagcatccatcacttctgccaggcctttgtcaggtgaccctcagagccccattagaatgtcttctgtagggaaaagcttgactacattcttgggttaagaaaaggtgatgctgtttataactgctgagacagggggctgagaaagagttggatatatcagtctaaatgaaaccataaattgaatagagcatgaatgtttacccctgtggtcctatacccacattccctccaattttcagactagacattcatttttgtaatgattgcattcatgcatgtttatcttaaagtggtagaaatcaggtgattgattaaatccaaatgctctggatgagatttgtaacccagcagcactgcagactcagactgcttcagttaggaaagagtgaaaggtgcattaagagaagcagctgatcagttcttggcaggcagagtactgctgaagtaacaatttgcagtagttttgcactcctgtcagtgccagttggcaaactaatggagatgatggaatgaaagaacaaaatgtcacaacagaaaggagtgagttgaaaattcaaacattttcttatttctcataatcctgctcaatcaaaatgaaatcagcatcagtctacaaatgaaccaactcaatagtgaataagaggcagctatctgcacattttttttccaagtaggaaaatcgattaacaatattgtgaccattagcttgttcaaaacatcatcatggtttgtaataactcagaggactaatttataaacaagaatattgattttaacagagtaagttttagttgagaatagcaactgatacagatgttgaaactttacattaaggattccgatgttgggttgtagtggaatatcagtgccaaggcagcaaagtcaattttaaactattattttgctaatagtaaatataatgcaactcctatatatcctcctaatatagatcatctggatttactatgtaatctttgcctgacactgcagactacactatgaaaaccaattctatgtacacattacaaatcatatttttaacttcaaagatttaagtgttattgacttcccatggttcactcagttttaattgtttttgtaatctagatcgattacctcaatttttgactctaggaaaaaaaacataaacttatttatcaaaacaagtaggagaaaatcaaattagcacatcatatcagaagtacagcacaagataactaaatgtgaaaaacagatgctgccaaacatcataaatatcaccccagtaaatacactgaagagtagatccttttacttcagctgaactatgaaacagcagccattaacacatcaagaatgaactacaacttgccaaaggttgaaaagtaattttctccttaatatgattttagagtgcagcaatgtggtggcttattcatttttctcccattgggtatacaggataagttgttttaatattcacatgaaaatagataaataactttattgcatggctgctatagagctcagagccaaagttgtgtgccttgttattattacaaatacatcttaatatatgcttcctaattgcatttctggttcaaatctgatttttatattctcactttacattttgctattctgttatgtttttctgtatttataaatgattgaatcacattgaataatgtaggattatagctgtgtcaatctgttagtgcctgatagtattttaaaggcattgattacagggtattttatttatatgtagtgttatcctgcatatttatttcataaaggtaatcttctaattacttattattctacactaaattagtctttggaccaagcagatgtgcacggttaatttcataaacagacttggtaaaatgcagtctgtttcattgccccgttgatcagtaccgaagccgtataatgcagtaccatacaccatatttaaaataccttaaaaatcatattgttctttggcagaattaagccattcctaaaggagaaaggcctatcccattcttaagaaaagaaaaactgcataacttatcacctgaatattttctgaaaccttaaaataaagcttctacattggcagagtctaaattcctctgacatcagtttcagcagactggaggttagctattacacgccaaaatatttctcttgtatatttcctgttggagtaagtcctgttactaagtacctttttttagcattaagaaaatcaaattctgtttttgctttttcactggtgaatagaggggttgggatgaagtatggccatattttttccattgagtttttttgacaaataataattatgtatatatatggggcacatatgacaccttgatatgtttataaagtgtaatgatcaaattatagtaattggcatattcatcacctgaaatatttattatttctttgagttgggaatattcaaaattctctcttccagctattttaaaatgtacaataaattattgttaactaaagtcactctattatgctatagaacactaaaatgtaatcctaatatttaactgtaattttgtactccttatccatccagcatttctttcctgaagataaatgctgtaagaattttttttgctgaatcttcttttctgagaagtttctctcagcaattctctcctatgcttgttgtttcctacaggcagtttatactccattgagctatgagtttatctttgtaattccaaaatttgattgtgttactgttctgctagaaaaatgacaactgtctaatccatgaccagatgagagctaaaacccttagtgtggtgtggaatcttgctattcaggtgtgatcctaaaaccagcagtattaccatcacctgcagtctcctttcagaggcagaatggcaggcccagccatgaccaactgaatcagaatttaaattttaagatcacccagatgatatattttcatttaaaagctgaagccctagttccaaagaccactccagtttagccttatcttgcccctatagcctggtccttccacctcctccttcccctccttctactttgtctccactggctctcccttctctaggctcacaatggacttttcctgcctctagctctttatgtacaaagtgacctctgtccagaatttcctttcctgacctaagaaacttctacatagttgttatgaccgagaccagatatcctctcatctggagtttcttttcaaactatggcatctgacaaattacaattatttggttctgtcctctgctttatagcacattttgcttctatcttcttagcgctgattgtgttgttagaattacctgctaacatgtctccttcccccactagactcggtgtatgtttgttttttttgttttcttttgttttgtttttcctcttctctgatacttagtagagttcaggtacatagtaggcccctagaaaaatgtttgttcaggctgggtgtggtggctcacgtctgtaatcccagcactttgggaggctgaggcaggcggatcacaaggtcagaagttccagaccagcctggccaacatagtgaaaccccgtctctactaaaaatacaaaaattagctgggcatggtgacgcccacctgtagtccagctattcgggaggctgaggcaagagaatcgcttgaacctgggaggcggaggttgtggtgagctgagattgtgccattgcactccagcctgggcgacagagcgagactccatctcaaaaaaaaaaaaatgtttattcaataaatttatgaaagagtggatactataacagatctctacattttgctcaaggcaaatagaaacaagcattgtcacccaaaagaccacaaggatggtaaattggtagaaaggagagttttattggcgttatcaatttccaagctgggaagagaaagtctccacaaggcacaaaggtgctctctcttcagagaggggaagaacaagttggattttatgcctcacagggccagtatcatacatattcaacaggtttaggggaaaagctgtatatatttatgagcagtgttgagcacacgcacaataggtaaacatgcatgtaatgtacatcccatgttcactgtggggtggggtttgagcattaaaagaggtggaatttcgctctttccatgaaaaggtgaactataagacccaaagacagtttgtgtgcagcctctacaaactggctgaaactggcttaaggtctgccatagcttttcagaaaaaaaatgtaaggccagtcctctgttcagtcagggttgtagtggtctgggtagtaaatcagcctaatagctcctactgttagggtatttagcagggctgtggtttgtcttatggtggtagaaatttggaaatttgccctaccagccaagccctgagccttgacccataggaaacttttgtttccttaacttagggaccatcttaattgataaagagatgtctatttcagtttttcctatcataatatttactagagagcagtttaagcaatttcctgtgttattctctagaacagggtccagaaattactcaggaccaagttcagggctcagccactgtaatttaacccaggttggctttaaaaattagctgttgcagcaaagttgataatgtttcttaataaattccacctacgattgaaggcatacaacacctacatgtgaaaactacactgctgtcaattcatttagaggacagatgacattgtttgaatcacaagtaatatcaagctgcgttagaaacaaactccctccctgtactgtcaaagttaaagcaggaaatgaaacctccattctcacacagatttatgagggatgtattgtctgaggtgaaaccccaaagtaaatgcaaaggaaatttttctattttaaaatgcatataactgtgtgattgtgggcttccacttaactttcaattggaagtcattggtctacaatttaaagacatgctaaaaggcatatattgagagatgaatctagtggaattctatgaattccttccaagtgacaaatatactcaactaaaatcatatgctcatgaatttatgtaagtctttagcactacctatctggttggaaaaacatattcaaagatgtaagaaacaaaatcttattacagaagaacatttgcaattaatttcaatgataaagaatactaactttgaacctcaattatgcaaaatgttatatactccccaaagaatttcattttctcactagtagatttgtattacacaatattcactccatttttactattatattttggattttatcaataacaaatttgtgaaaattagtttggtatcttgtcacataagtacttggacaacatacttgattttgccccttggcccacaaagcctaaaatatttattcattggcttcttacagaaaaagttttctgacttctagaaacaaaagcagagattaaacattcaaaacaataaatatgtatttattaaaggtatatttataagctctgagaataaagtagagacattttcaccaattcagaacttgtattgtcaagtagtatgcttacctattttctaaataatttggtaaaatatataacaataatattggtatatatttaaaatatgtatgtgaattactttctgaaattggcatcagaataaagggctatgaaaattatatgggacctcaggtggaaatctacatataaagtattttcatatctggacagctcaggtctagctcagatttacttactttatggacattttacatctgctgtacaaagaaatttggtcttcaaggaatttgtcttgtcaggtagcaaattgttataattttttaaaagctgaaaactgccttcatatttaggtgtgctgaatacactctcagttcctgagacaacttctgtaattaaaccggcaagtatctcttcactgtttactgtacacttcacatcacccatagaggcatttctgaacacacaaggagggcacttcagagctggagaaaggggaaattcattttgtcacactatgacttatatatactttttaaagacaaagcaattttctctgtcgaaactttgattcttttagagctattatggaggagtagttacatcattcccaaaatttttactgcaaagtggttgcctgttagaaacacaatccttacagaactctcaaaaactggcagttgctgtaggtagtcaattgaagaggatcaaacacatctgttggcatatccatctgttaccaaaaaatctctagtctaaaattcttgctaaaaaaacttccattttgattagaacatcactgagaagcttacaaaattgagactgaaagtcattacctttatggagtaaatcataaggaaataaaaacaaatgtctctcaagtagattaattttattccaaatctatttttttttttaattaatggaactgttaccagtggagggtatccagattcttggcatttggaacaaagaattaggtaaagcccacaaacaaagcaatgaaagaaaagcaccgatttattgaaacaaaagtacactccacagagtgggagtgggcttgagcaagtggttcaagagcactggttatagaattttctggggtttaaacaccctctagaggtttcccattggttacttagtgtacaccctatgtaaatgaaatagtgatcagcaatcagaggctgaagtgatgttacaaagttatacttctatgcaaatgaagacttggcctgggaccagtctgattggttgtgagatagaaaccaatcagaggtcctttcatctgccatgcagaaaagtggggggtggggaggtggaaaaagagtcacgtatggtccttttgttacttgggcatggaaagttggagttttcattttggagtttggagttctaggaagctagccttaatcagccttaggttctctgcctccagaccctattctccttcctcagaaacaaaaaattttctttttaacttaagtacttctcactcattgtttttcctttccccagtgttctatttggatcccattaaataaattaccatcttactcacttgaggaatcttttacttctacctagtagttaacctactaccagtattttaaatttttatgccaaatttatgtgagcacataacagtatataccagtatgatattaaataattttaagtctacttatcattgagttgattataggtctcagaaataaattctagtatcacgtatagtttctgaaaattatccttaaaggtagctattcataactctgagagagcactgtgcttttggaagatttctgaaacagtctttttactacatctgattacagacattctgttatagcctccatctatcagtaatcacattttaaggtatcatttgtcaagaaaataattggtcaaaaacattacaaatatcaaacatctattgaaaatatatacagcagtacttattaaaatggtgctgttagataacaatgaaaataagaaaaatacgtttttgaaaaaatagctatataaataagatgtcattgttctgaatgactattgagccatagatgtttgatctcttgcttaaaaggtttacaaactcttatcagcaatcataagtaacatgatgcactgagatttagcatttttaataatcctgatcttgattctttaatttcttacgtcatgacaaaggcagcagtcttaatttatataaaaagatttctaatacataggtctcacatctcacaaagattcagaccagctctcagagaatactttttaaaatacaagtagttacattttaaataaaattatttagctgttttgtcaatcttttcagattgttaacaacttgaacaaaactacaaaattatttcctttatggttatatccagtgactaatattagtatatattcttttagcaaaatatactaacttaaccatatattgaattgattcatttattttcattttgcttactaaataacactaggcaaatcttgtgatttactctgtcttagcaagtttcacgtatacaatacattattattaagtatactcacgatgctgtacattttgtctctagaacttattcatcttataaaccaaaatttgtactctttgaccaacatctccccatttcctcagtatctctccccactccgtaatcacactctgctctcagtttccatgagtttgactctttagattccacatatgagattatatagtatttgtctgtgtatagcttatttcactaggcataattgtctcaaggttcatccatattgttgcaaatggcaagattttcttctttttaaggctgaaaaaaatatttcattgtgtttatgtgtatcacaatttctttatccattcacctgttgatggacacttcagttgtttccatgccttgtctactgtgaataatgctgtaatgaacatggaagtgcagatagtttatgaggtggtggtttaatttcctctggtatatacccagaagaacagattgatggatcatatagtagttcatttttatttttttaggaaccaccatactatttttccataatgtctgcaccaaattaagtttccaccaacagtctataagagttcccttttccccacatccctggcaacacttatcttttgacttttttataatagccatcccagcagacgtgaggtgatactcattgtgtttttcatttgcatttccctgattagtgatgttaatcaccttttcatataactgttgaccatttagatgtaagctttcgaataaatgatggcctttgcccatattttgattgagttttttggggggtttgtttttgatttttgctattgagttgtagagttccttatatattttgaatattaaccccttctcatatacgtggctggcaaatattttctcccactccatatgttgcttttcactttgttgattgtttcatttgctctgtagaaacttttttgtttgatgtaattccacgtgtttatctgacttttgttgcctgtgcttttggtgttctatccaaaaaataattgccaagatgccaagattgatgtcatacagctgttccctgatgttttcttgtaggaattttactgtttcaggtcttatgtctaagtctttaatccattttgtgtattcttggagcttttgctgaagattagtttgtcttatatacataggtttatttcttggctttctattctgttctattgatctatatgtctctttttatgccactaccatgttgttttgattaccatagctttgtagtatactttgaagtcaggtaatatgatgccttcagtttcattttttcttactcaaggttgctttagctaattagaaacttttgtggctccatatggattttaggaatttttttacctgtgagaaaaatgccattcaaattttgatagggattgcattgaatctgtagatcactttgggtagtatggactttaaaaaaatatttagttgacaaagattatatatagtcagctatatagtgtgatgatttgatatacatatacattgtttgatgtttatcacaataatatcaattaacacattcatcatcacccatgctttacatgagagcctcaggacttgtttatcttataactatcagttggtagtattgacattttgacactttattatttcacttatttgtgtcttctataatttcttttatccatgttttatgtgttcagtatatagaacttttacctccttgtttaagtttatttacaagtattttattcttttagatgctactgtaaacagaattgttttcttaacttattcatcattagagtgtagaaactcaagtaatttttgtatgttgatttgatatcctgcaattttagtgaatttgctcattagttttggtgaattctttagagttatatatatatatataggattatgtcatctgtaaacaaagaccattttacattattctttgcaatttggatgccctttttttttcttttccttggtgaattgctttggctaggactctcagtgttatatggaatagcagtagagagagtgggcatccttgtcttcttccttatcatccttgcatttttatatttttaatttatattttatttattccaaatatattgtcagaatttaatgttaactattatactgataaagcaaaattatctgccacagaaacaggtaatattatccaaactttattttcatataacataatatgattcttttggatcaagggctatattcctgttctctacaatctgagttgtttattttatattttcttttgggttttgtgctttaaagagaaaagatgtttattattggttaagggctatcacacacacacacacacacacacacacacacacacacacacacaatttccagattttattcaatattgttctcaagtaaaaagtaaatctgtgtagaaacccatatcggttttgattgtcaatgttattaaagcatagaggtgaaaagccacactttgaagtaaaagagatttaagatgaaatccctgtgctactgttagcaatgtgcccttttctgagcttcagttgccatcaatgcaatggggataataatagttcttgcttcattaggagggtgtagatatacaaatacaataaagtgcttggtgaatactaagtacccagcaactgttagctactattactctcacctgcttttgagcaactgccagtattaaactcactgtttgagaacttttattattttcatatataagcttattgcttattgaaaaatacctttcattttcctctactatttctagggatgctaattatatttaccagaatatatatttaaaacaacctaaacagcttattagaattgatttaatgtgattaagtgatatgtttattccacattatttctatgcagagaaaagaaatttcttaaggaagaaatatcccaaacaaaaatatgttctataatctatctatctatttactttgcgtaaccataagaccagtgttcattcatgaaaatagttttcttgtttggtgataacatatgatatgtgataactaagactcaagaatatataaaaaataatttaccttttcaaggaacactataatttactgaaaaatatcaatatgcagacttgtctactcaacctgcccaattattaatcctttaattattatcaatcactgggagaagaataatacaactgacataatcttctctaacatttgctacagtgccaatactttttcaatagtgtataagcctaaatattttcaaatcaacaaatactcttattcataatattaattttaagtgcctctacaaccttcaacattaattaaatcatgttaaaacacttgaaatatacaaaatatagattttcagatcattatttccaagaagctattttattagtcagtttccacactgctgacaaagacaacccaagactgggtaattataaaggaaaagaattttaatgtactcacagttccacgtggctgaggaggcctcacaatcatggcagaaggtgaaaggcatgtcttacttggcagcagacaggagagaatgagagccaagcaaaagaggttttcacttataaaaccatcaggtctcatgagacttattcactaccatgagaacagcatgggggaaacagcccccattatttaattatctcccaccaagttcctccaataacacatgagaattacaggaggtacaattcaagatgagatttcggtgaggacatagcccaaccatatcattccacccctggaccctcccaaatctcatgttctcacgtttcaaaaccaatcatgccttcctaacagttccctaaagtcttaactcatttcagcattaactcagaagcccagagtccaaagtctcatcggagacaaggcaagtcccctccatctatgagcctgtaaaatcaaaagcaagttagtttcctcctggatacaatagaggtacaggcattgggtaaatacagccattccaaatgggagaaattggtcaaaacaaagggggtacaggccccacgcaaatccaaaatccagtggggcagtaaaatcttaaagctccaaaatgatctcctttgactccatgtctcacatccaggtcatggtgacacaagaggtgggttcccatggccttgggcagctctgcccctgttgctttgcagtgacagcctccctcttggctgctttcacggcctagtgttgagtgtatgcagcgtttccaggtgcacagggcaagctgtcagtggatctaccattctggggtctggaggatgatggtcttcttctctcagctccactaggcagtgccccagtgagaactctgtgtgggggctgtaaccccacatttttcttctgcgctgctctagcagaggttctcatgaggtctccatccatgcagcaggcttctgcctgggcatccaggcatttccatgcattctctgaaatctaagttgaggttctcaaacctcaattcttgacttctgtgcacccacaggctcaacaccacgtggaaactgccaaggcttggggcttgcacccactgaagccacagcccaatttgtaccttggccccttttagccatggctagagttgctgggacacagagcaccaactccctagcctgcacatagcaggggggccatgggcccagccgaccatttttaattcctaggcctatgggcctgcaatgagaggggctgccacaaagttctgtgaaatcccctggagacattttccccattgtcttggcaattaacatttggctcctctttacttatgcaaatttctgcagctggcttgaatttctcctcagaaaatgggtttttctttcttcataaggctgcaaattttccaaacttttatgctctgtttcccttttaaaactgaatgcttttaacagcacctaagtcatgtcttaaatgttttgctgcttagaaatgtcttccatcagatacactaaatcatctccctcaagttcaaagtcccacaaatctccagggcaggggcaaaatgtcaccagtctccttgctaaaacatagtaatagttacctttactctagttctcaacaagttcctcatctccatctgagacaacctcaacctggatttcagtgtccacatcattatcagcattttgatcaaagccattcaacaagtctctaggaagttccaaactttcccacatttttgtatcttcttctaagccctccaaacggttccaacctctgcctgtcacccagttccaaagtcgctttcacatttttgggtatctttacagcagcaccctactctcccagtgccaatttactgtattagtccatttttaagctgtgttaaagacatacctgagactgggtaatttataaaggaaaagagatttaacggactaacagttacacgtggccagggaggcctcacaatcatggcaaaaggcatgtcttacatcgcagcaggcaagagagagaatgagagcaaagcaaaaaagggcttccccttataaaaccatcagatctcatgagacttattcagtaccatgagaacagtatatgggggaaactgcccccatgattcagttatctcccaccaggccccttccacaacacatgggaattatggaaactacaattcaagatgagatttgggtggggacacagccaaaccatatcaactatgtaaatgcaaaataacaaacacacatcttaacaagacttcattcagctatgttaaaaagaaacagcaataaatgaaaaattaatggtacaaagagatgtgctagaattgcaacaaatctgacatttctgtgtttataacaagctcgtatatggtaaatagttgataaatgctatttatcctagaagaaatagaaagaattgggtaaggattgtcttggaagggaagagagatatttagacagaaaagaataaaattacagttggagtgttattcaaaagatgaaggatatcagctaaaaacaacaaaaactttcctttaccactagcacactagttgccatcactcttatcttctcttgtttataattgtctatatcctctaactccacttcctaatcaccactcaacccatttcaatttggtttcctaccccatcttaccacataaataactctttgtaaagtcaccaatgacctctgggttatgaaatccagtggacatattttagtcctcaacttgaccacttagatgtgggtgactccattgaccccttagttcttgaaaatcttctgtttcttcagcttgtattgctctctgggcctagttgtttatcatgcttctaataactacttctctgtctctttttgctggctcatcttcatcatccagacattaaatattggagttcctcagtgaatagtcacagactccccccatcctttttctctgttcttctttcttttcatctcctttccttattctaaattttctccctaagccatatcattcatacctatgactttatgatctatatgccaatggaatcttcacttaggtctctcatccagaattctctgaggttcagacttggaagtgtaattgcttacacaatattagacaattaaggatatctcaaaaatgctttaaaagaacctacaacataatatgtccaaaccaaatgagttatcctcctacacacaggcatgcacacatttcgcacatatcaaaatctggagttctaattgaagttcctacttcaattcaattttttaagtcagaaaacaaatggttgtttcaatatttgccccttcctctacctccccaccatatgtagtgcgtcatcaggtagtgtggacctgacagtcagtctgtcttgaagctgtctacttatttttatcttatctataacagagataacattgtaagtgttcattaaatccagaggcatcttcagaaattatttattgttggttaaaaatttaacatctcttggtcaggtaaaagaggttagaaataaatgcaatgaggatcaatatactaaggaaacagataccttgaagggatgggaaattgataagaggtagcaaccagcagtgagtcgataaaacagaaagggatttgcaaagatttcacttgcagtagattgcatgtgaatcaacagtatatgtctgctgattttttaaaaatcaataaaggatccataaataagaatatagtacatgaactctcatactaattatttatttcatattgttcttgatatatatttactggggacaaatgcgtatgacataaaatttgccattttaactatatttaggtgtgtaattcagtggcattaattacgtacacagtattgtgcagccattaccactacttatttccagaacttttttactacactaaacagaaacactacccattaagcaataactttctactagtaacctttaatctattttctgtctctatgaatttacctattctaggtatttcatataaatggaatcgtgaactatatgtctttttgtgtctggcttattttgcttggcatgtttcattaatgttgtaacataaatcagcacttcagtgctctttatggctaaataatattccatcagtatctatatattacattttttaatctattcataagtttatgggcacttgtgttgtttctgccttttggcttttgcgaataacactgctgtgaatattggcgtacaggtatctgtttgaataattgttctcagttatttttagtatacaccaaggagtgtcattgctgggttaaatgataattttgtttaactttttgaggaaccatcaaactcttttccacagtgactgtactattttacatttccacccacatacagggttcctctcattgttaatttttcaagtatagtattaattcagtgtttgataatttagaaatcataaagaatttgttgcaatgtgttaacgacattaaagaatttaaacacgaaggttaaaaagcatcagcacaatgacctggaaaaagacttttagtgtaaagaaggctatggaataatctaatatttattttcatttaaaaaaagattacatttaaataatgccctgtctttcatacatgtggattacactaataatccatatgaatattgcatccaattcaagttgttgttagggaatcagaaacattactctgatttagctactttttgttttgttgtattttgttttgtccaaggtccaaataagcaaaagtattcatcttgaatttactggctagattagtaatttgtctatggaaaatatcagagttaattgcctgctctaaaaataagttttttaaaaaattgacctgtttgaactaggtaagataattgatcacatataacgaacgactagctatctggttacacttttttctattcagtgccagaacaaaagaaagaaatttagtttataacacattgtcattatgaagttatgacagaaattatctgttttctaaaaaaaaaaacagttatattgtttctatctttgtatagaattagaattagagagatagttttgtaaggcagatagaggatgaataggatgaccttttaatttcccattttgccttgtgatttcttgattgttctgcactactgacatactgagtcaattttattgggatacaggaattttcattcttactgcagtgtatatactcacattgccatacgtggagaaaacacttgaattattatatttgggaaactaacaaagacttcagtgtcttataaacataggaagaatatcttgtgaatgcatatacattttccaagtctataaaaaactttagctccttgttttgatagactatcagcatatgagattctagagattgtataaattgggcagttctgctttaaaaaagctatttttttcctaatactatatcttcatttcctacaaattattttatctagcatagcatttacactgacgttcatggtaagatataaaaacattctccttggtaaatttaagaatctttttaaaatgtctgaagtagaagagaacataaagttttccaggttctctagctgaaagaaagaaggaagctctggaaattttctttttcttttgtgctaatccatgacaatatcaagattcttcatcagtaagtgatgctgaagcacccagaatccagggttcagttcatgggtattgaatcagtagtgccttaatcctatgtgcatttaacattaatattattcatgctttatcataatgtaattctctaactgaaaaagttttaataactccacagtaaatagagaataaagtacaaacacttttagtcttttttctcagaatatttggaactcattttaactctcttttcagccttatatttcactattactcatcaaatactcagggtataaaataaaccgtacattttactctgccttactccctacatgcccttcatgtaatcccagccaaatagacatgcctaactctttgactccacctataaaagtcctacttactcttcaagtccaatttcaagatcaaatgccatcatttccagtaaacttctctccgttcactgaatgggaaataattttcaccacattgccactaaaagaacttttgccactattgatgtatttttacatgttatctgaaattaaaattaggctttatgtgctttattttttctatttgtgagctccatggggactaggacaatatattcatcttggaacttaccaaaacaccaaaaaaagtgtcatgcagatagggagtactgaagtagagtttattattttgaattgaatgaattttacattttcaagcatagattataaaatgttatttttaagaagagtaaattttattattcattaaagaaaataattaacacatgggtaaatcacggacatcttttgaaaacagtgtaggctaagtgttgtcagtgttttagaacagaaaataacatgaaatggtaactttctgaaaataactttttggtttattatcaagttatacatttattctataataagaaacaaaaacatccataaaaatgaaattaattttatttccaatatcaacaataactcccatatgtaccaagtttcacttctaaccccacaaagtagtacatagtttatgtatttttctgtacatatattttatgcattttttgtacatatatttttgtgtttaatggcagtttatcatgaccttttttatcttgataaatatgctcctcaaacattatttttaatgaatgcctagcattcctttcttatctccataatttctatttttggacatttcaaatatcctaattttttactgtatttaaattattttagcttcatttatgtaatttaatcattagctcatcttggactattttcttgagattaattcctaaaaatgcaagtgttcttcccaagacatatgtgtattgttaaagctattgatattcactaataacatgcccttcaaacattttttattgccaatttcttttggcaacagtagtattttggaatgcccaatagtgactgtgttaagcaccctatttctgacacaagttgcattctctaaagtgttcctcaaaattgggatatggtacaattcttatctattagatattgaagtacttgataaagaaaatgcagttggattaaggatataataacttggatccttttttaccttccattttctgcatatatgttttggaattagttttattatggcacatgaatggcatgtagtatatgatgacttagtattgcaaattcagaaatgccaactgaattaaagaagctttctagttctgaagttaacttgcctaggttcaaagtgtttcctgccacttaccatagtgtgatgttggacaacatacctaacagctcttagccaccatttcattattcacaaaatagaaataatgacaataccttcttcgaagggtggttgtgagggatagatgcaataatgcatataaagtaaattgctcagtgccttccaactagaatgtcttcacaaaataatagctgttattaattttacctataatatttcaaaaatatctgcttaaaatacaggctcattacttgatagatatgctcagtaggtggttttatttattgtagaatgtatattacataagggggaaatgtgaaaaataatattaattttatgtgtacttcagtaacacttcataaaatatgtatataatcaacctctctatctcatgaacattgaaataatttggggaaaaaacacagctttgtgtcactttagagtaggtcaaatgaaaagagtatgttgcccaacattactacatcaattaaactttatatgaatatttaaaggattctggtaataattcatgtgacaaaattcaaaagcagccttttcaataaatgaaaagtttccaggtcaaatctcttcccgacattcatacatattttcttgtcttgcgttaacatgagataacagtcagggttacaattttacctataactaacttaaagaaataagacaggtaaaaagaaaagaactgatttcatgacacaaatatagaattaaactgtcaagattcgaaatgttcaatatacctcatttagagtaagaattttaaattcaaataattttctttgaatatgataggaaatgaatgtattggccagaaatttgtgacaattaattgcagaatggctgaattgtaatgaaaggctctaaggaaaaaaaaatgatgaaatgaatgtgctgtttgctttcaaatcatttacagttgaataatttatgttatctttaattcatccagttaaattatccaagatgaatacaatatgaatagaagaggtttaaaattgtcaggtttttgcattaaaatgtttgccagtaaccactttctattttttattaccattttaatggtttcatatattgcaatatgagttagaagactaagctggagtatacaatgtaatgagtttccagggttataaatatttgacctatgtcttgagacattaaaagaaaacctcttatgtagataggttatgtattcactcaaagaaaactaacctaagtggaaattactctgatctgccccctaaaatttcacccaccatattctttccctttctctgaataacagcattcttcagttgtttatgccaaaaactttggagtcaacctgattttctctaaacgctacttctgtcagcaaatcctgtcagaagctacctatgaaataaattcagcgtacttagaaatgcctactgctacccccttttaccttaagccaacatcaacattttatctcttgttctctctctggattgttaaaatagtctcttagttctccctgctttagtggttgctttcctttgctttcttttcaatacaaccatcagaatgtgccttcataatgaaagttggaaagcgttagtcctctcaaaactcccggtggcttttccatcttgctcagagtaaatgccaaaggtcttataataaacttcacagcagtatactgatctagacccgctgctattcctctgattttatctcgtagcactatctttctttttccctctactctctcaaacacaccaagcatgccctcacctcaaggctatggcatctctgcatataaaacaaagacatacaatttctcatattccttctcattctactaatgaccccaccattgctttgattcttaccaagagagccctgtaatcaaggtctaaatgtgacttaatttacggttcatatagcattctactaggttctttacctgaagagttgaaaacaagactaccttcctgtaagcttacttaacacaaagaattagatactgagtcagaactcaggtttcgttaatgtctaattagcaaaagaacaagataaagtaggaaggctagatccaagtcctagttgaactaaatgattactgtacatctgaaatggaagcaagacaaagaccaattattctaaggagaaacaaaagagggcagatgtcttaaggtgaatccaaaactaaaaggtccatatccaggccgtaatccaagcagaggtgtgaacaggatatgagaaaaaatctaatacctgtcattggtgaaagtacttatgagtggtcagttggtactaagaaaggggcgtggagaaaggaaatacgacagcaattgtacccactttgggatagtgatattcataaaaagaatttccttgggagcagggataaacatcagaaaacagagttttagaaaaagagaagatcaagaagtaccacgttcgatgaaacactgagttataggacagtgagtatcattgatagaatagaatttaatttctgagtgtctgggcagccagctccaagtctgaattagtgagaagtcactattcccatcattaatgtccagagtgacccaaagtttttgggaaaaactcaagtagtcccagatgcagtattccacaccacggaatgctcatagaaaaaaaaaatgagtttcattttagggatcaactacaggttgcaattttcaataggatggtcaagaaagacattattgaggccaggagtggtggctcacgcctgtaattccaatactttcggaggttgaggtgggcagatcacctgaagtcaggatttcaagaccagcctggccaacacgacgaaaccccgtctctagtaaaaatacaaaaattatcgtgccacctcactccagcctggcgacaggtgagccgagatcataccactgcactccagcttgggtgacagagcaagactcgatctcaaaaaaaaaaaaaaaaaaaagaacaagaaaagaaagaaattattgagaagatgatattaaaataaaaataaaaggaggggaaggagagagggagccatggagatatctaggagcagagcattctaaccactggggacaactgcaaaggtcctgtcttaagaattgcaagaaggctagagtaggggagcagagtgaggagaaagagaagcatggaaaataggcttggagttgaggcacacccgtgggaccctatacacaaccatggttaagactttgtgttttattctgagtgaaagaaaatgctccgagatggttttttaacagaagaatacgtgatctgtgtgctggtgataagcttgtaagcatgtcctttattcctggactaaccactgcaaaatggttagctaaaagctgaaagagaagtaaatgcaggcttcattttttttgtttttcttttttatgtgataataggttcttagtatatgagcttcaataatttgtgcatagtgttttatatacctctcccagacatactatttattatttagctttctaattccttctaattttgtagcttagtcacgccaaaactaagttaaatcacatctatggagcttttgtatgtgccagacattgtgctgtatgctttatatgtagaatctcatttactcttccaacagcacataataatcatcaccaccattttattgatagggaaactgtaaagcacagaacttaggaattccagagcatgtatcttcaccggagttaacatcatacttgtttttgtggacctgactgtccccttcagatattttctttaggttgcctaatatttcgttacaagagagtacattctccaggctgactagatgtctaagcgagaagacagtctgcattttcagtcttttgttatagcatgagatgctgcctgggacatagcatagtcagtctagtgattcaacatatgtacaaatgaatcagaacacagggttcctatcccagctcatccatttgccagctgtgtttctcactttggttctttataaaataacagtacctaaagtaggattcaagccctattagattttgagatcacattttaagagaaagaatacaaaattaggcacgaaagtgagtatttattcatgtagagaaaataaaacatagcaaaatatgaattttaaaaagttaacaaataccacacaaattataaactgcagaaaaaagtaactatattgttgttttgtaaataacatgatcctctagagtttttttcattttttaatccatttttggctatatattcttcaattgcctctgcacatgacttcaatttggtaatatcacacaactaattacacggtaaaattattttgggtaataaccccagtattgttctcttccagccctgcagtgaaagctgcccatcagactctgaggaggctgcataattaaactctactgtttcactagctaagctgctgaaacacagtaaaccaagtcctgggaaatttctttttcatggtatacttaacaacccatgaactataatgtgatatggaaatccagtttgcaatgctctgttcttcataaaacacagagtggcattattctcaagtacagtttataataagcgagaggaaggagatacagctggtaaaattttgttctactcacagatagctaagaaacttcatgtgtctccataaaggagtaatataaaatttgtgcaaataagttgcaaattcaaaaggaactcatataaggaaacatatttgtgatggtatacactcctgaatatttaacattttgatcaccgtgaactataatatataatctgcattttatggttttctggatgcttggaaatttcaggagtatttaattttaaaaagattgtcaacatgcagataaaaaatcagattattttacatctataagtgaaaccttgttatccccttcatttgaggaaatccaaggagttttaaacagctctactttactggctatctctatacttaagccactagttggtttttggtttgtttgtttttagcatttaatattagtgtgtgttttcccataacttaattaccaaattaataaaagggtcattcttcactaagtatcacagtagtagtgagtgaagatagtcattctacccaaacagcctttgttcgataaggttaagtgcagtaaccagaagttggaagtatagaagatgtgctttgaaaatgcatgctagaagacttcggtcacagtgacatgacagaggattgttggaaaataacatttgaagtcaaactttcctgaaagcccaggcatgaggcaaggctttctggacaaaagtttccagcagaccacagtctgacacaccatcatgaacaagatcagattttaagcctccaagccaatcaagaaattaccttgaaatgtgcgcagtgtattttaagtaaaaccagtctctgtaggcactcaatatatgtttgtttaatgtaattaaatttgaattaaattcagtaaggctggtttcctaatataaaatatgaaaaggcttattgaatttcaaaattatttttatggctattttaaagcaattactaactttgataataaaagtgtgaacaggactgtaattcattattaggctggcacttcttactgtgggcatttgtcaataacttttctggccaagatatggggtgatctttggaatacacttgagtaatacatataaaaacagtttgaaaaaccaaaagctgtctatatttttttccactgatctatttgtcaaactatgttgattcagaagcactactgaaccaaaatatgccatcactcctaagatggaaaaaaaaaaaagcaatcccatcattattatgtattgtgggaatacatatgcatgggagtaaaaccctagctatttgtgcaagtttgatagacagctaataattaatttgatagttgttcaaaaaaatcaataccaaaaaactgaagccaacttctgtaagttgtggggcttcgtatatgggccatctgaaatcgccaaataacctggacaatttaagttattcttacataattgtgaataaagaaaatcattttgttctgagttcaagggtttagaaaaacagagcattgccaacccaagaaaattcgaaacacaatgggaacaagaaatctatatgcaaaagtgtctggcttgaataaaaaagtaaatctaaaagctgccacagtatctaatgtcctaagcctctcaaagaattagttcatggatttacttactgtcaaggattgaaacctacctagacattatttaggtagtaacaaataaacacacaaacaaaaatatatttgttggttactaaggaatgaaatttacctataatagttacccagagtttcagttcctatttctatgtgagaagaacaaaataacattttgtttactataaagattgaaatggtaacaacctgaaaagaggaaaaaaagggaaggaaaatagggaaggagttctctgtggactctccttcaactgagtgtgtccatgctttgtgctggttccctcagtatgggtgtcctatgatggtacctggctgtctttggagaatatgaaccaagtactaaagtggttttggaaggtttgcattgttgagagtttcaaaaatataatacctctgttttaaaaaaccaacgccattaagtttcatgcctggtttctataactgaagtactctgaaaaaattcaaatcaattttttggtgaataactaaactgaataaaatgtcatcaaagtcttctcaagacttattctaaaattttgtagtattcactcacatacaaataatgaattatgatgatcggctagctggcaaagatgtgcttttagccatcctgctgtccttcctggaggtaccattttacccaggagagaaaatcttcaggaactgcagctttattgaactgccaatttagctaatttttatttatttttcaaactttacttttatcatccaattgagagacgagcagcagatggcttctgcctccagctcagctgccctgctataaactaaactggaaaacatggtagtaccttggttctcccttattcgtaaatctcactgtcaaatcaggaaacgtctactggcaacctcagagtatttcctttaaagacagtcccttaacactttcctactctcgtttgagcagcttgtcttgtcagataatgaagaaattttttggagcaaattattttaattccgaatggcagacaaatcaattactttgaaaatattggtttcatattgaccaaacatgttcaaatattaaacacacataattttaaatattctttttcaaacagggaggtcaaggtttcattcaaataaggtttgaattgacgttgttttgcttgatagaatgttacctggcactcactgagcaaaaagtcacttttgtatttaaagaacatgtaagctagtattttatttcactttgctattgtggttaaattcaaatttgagaatattatttttagatcacttcctagccaaaagcattgtcaagtgatgatgtgtactatttaaatagaaagcacagaattcacgacattttacctcagtatttggttaattgtggcaaattaattgtcattcaccaaatgcttgtgacctttcttttcttcattctcccttccgtccaagctgctgttgaaaacagagactgttgttatcacttaataatactttggccaagtgtaaatgtgatattatacgtattgtgcctaggatcctaactgcgcaccttctttaattcatttataaaatttttaggctaatacgagctttgaatgcaaacacattctcttcagtgatatatctgtatagtctaattaaaaataaaaatataaagaccttaataaatactaataatggaggtcaaagggcacatagtgaagtgcagttgagaaatgacgtgacctgtgtatttgtcttattcctgctatatcgcataaacaggagaatgaattgaaaattgtaattaagatttattccattttgttaagattaaaaatgagcagtcaaataattctttctctgagagaagagtgtatggtaggtccattgagggtgtctgttgtatcttaaaatctattcgaaatgtttgggtgaattattgtctaaattgacagatgattgcttttgagctaacaaaatatttctgttagcatagctaaagaatatatgttaaggaatatatgctctttgtaagttttgattgagtagataagatgatacagacacatgaatcaggaaacaaatcaacaatcaactggaattacaaccaaatctatgtacttctgttgtgagatctttttacttgcaatcctttgcaaaacgtgctgtgcacaatgtagtaagtatgcttgtaataaacaattaaaggagcttttcacgtgtagaagtgcacgcttaatttttgttaaatcatctcaataaatacttataagtgaagccaacatgattttcttaagttttttgaaaatgtgtgtacctataactgctgtgctatttgcaagaggcagtatacacacaaatttgatgatttcattctttaccaaatactatatttagcacattaaatactaagaaatagcactaaaatgggccgggcctggtggctcatgcctgtaatcccagcactttgggaggccgtggcagacggatcacttgaggtccagagtttgagaccaacctggccaacatggtgaaaccccgtctctactaaaaatacaaaaattgctgggcctggtggtggatgcctgtaatcccagctactcgagaagcttgggcaggagaatcacttgaactcaggaggcggaggttgcagtgagctgagattgtaccactgcactccagcctgggcaataaaagcgaaactccacctcaaaaaaaaaaaaaaaaaaaaaaagagagagagagagagagagaaggaaggaagaagaaaagaaaaaaagaaatagcactaaaatggacataaaatatatattggtgttttagaactaattttacaaagactgaaatttaaatatacactcaattttaaatttttaaaataatattcagaataatgggttcatttgtaaaacaaaattgtttgtaggcataaaggattaattgaaaaaatcagtcatgcaaggaatatctcttatatgtagaatgagtattaatttccaaatgacattttaaagaaacctcttataatagtaccctttaaatcactaaaaattaatctagcatacagtcacatgtctgttgttttgtactagtgctccgtctacatttatgtgtataaaattttttaattcagttgaaaatctctttatataaaaggctcaaactgtcctttgaaatgaaacaggcccaatgaatattccattgatttcattgtaacattaatgggggaccaagtcatagtttgagcagaagagaaagttaagtaatatcaaccgctttgtttttcatagtagaacacccatccaaatgccattttcctgccagtaagtgttctgtagagcagtgttttaaattcccataataccacttctcattatgaaaacctcttcacaatttaaagggtaataacagaagactaagccactacaaatgtccaaaacatcttttaagttagtcatatgacctctgaatatattaatatcttaacctcaaattagggattatgtcaaaaactaggaaggatacttctcttacatacattttatttgctgtatatttattatttatttgctaaatattttgtcagttaattatttcttatttattgtatatttaaagtaagttactaaaagctgcgctcccagagtgcagaaagcactaggcctgaatttagaagtggtaggttgaataactgatatttctagctttgccattagtttattgtgaggatcattttggaaagtcttttgatctttgcctctacaataaattagtaacaaaattatctgtattatgaggatttgtgttgttgttgtttctttatttttgtttgaaataattgttttctatatttcttttgctgcaggaaaagttttgggtttattgtgttttctcataactgtataattttattttattttaatttacttgtgtgtctgtgcatggagatgagggccttgctttgttgcccaggctggtctcgaattcatggcttcaagcaatcctcccaccttggcctcccaaagtgctgggattacagacatgagccaacataactgtataattttaatattgcaaggaacactcttaaaaataaattaggaccgggtgtggcagctcacacctgtaatcccagcaatttgagaggcttctctatggcttcaactattttctcttacccaagttgccttccaagctttagatttgtagactctaaaggaagaagcctaataggactctgcagtctacacagaaaggaaagctggctgtggataactaagaaccacatggcaaaaaaaactagtcattgggttctagaggagaatacatccatttctgttgctagtgggatgctggaatataaatttttcaaaaatcctttgtttaaagccaaaaactgctaaaaatagcagtaagtttgaaacttaattattggaagcttaatagctccctctccaatgtatacactaacaattgccaactgatgtcaacacaaattgtgaacatgcaagaaaaactaattgttctatattattttacagttattattgattatcatgccctttgcaaatcaagaaaaagaaagtgtaataattcttaaggtgaatttaacagttactagaggagaggaagcatgtttccaaatactttcttaatcaaacattaaaatcacaggcttcatttaaagggtgtcaaccaagtataaataaaattcgactaaattttcaaacatgatctctgatcacatatagatagactggtttaagaagagacttctttcatcaagtttgaaaatatttgttttttttctctccaagggcatcctcttcagccacaaatagcttaagagagggtaaaaattgaggtgtgtagattgaccaaacacacacaaacacacacacacacactgctaagaatattttgtcctctggcctctggtagaatattttctaccattggcctctggtagaattttattgagagtattcagttaccacttgaaatgcgtttgggtcagtgcctttgaaacctagctgtatgtacatcacgtggaatacaagtaggttgagaagctgcatcacacattaaaatgagaacaaatgcaaagaaacatgaggagcatgataataaaagttgtatagcattcaacttttatctgtgttgtaagccacaattgtactcaaccctctcagtctaagctgacagactcaaaaacttcaaccagaatgaagtatctcaacatttctccttttcaaacacatatttaaataaagtggataagcttcattcaaaccaaattaataataagtacatccaaaagtaaccacattaaaatgtgacaatgtagagaattatcagaactttactgctaatactgtgaatctataaacaacccacaggcgtgagaaaacacaacaaaaacctaatcctggccatagcaacatggatccatgtgtctctaagaccagcctcaacttagatgaaaacgcaagtttcttttcctttcacttcgcttttttttcttttgatttctagtcttgtcttcttactgttcttttccctcttctttttcttttttttttaagaaatatattccttttaacattggagttctccaggtttaaacgtaatcacaaaggcttttaccttgggtttcaaccctaaaatcacagcagtggatctagaagtggcaaataaggtctgattgggccggggtctactcattatcagatgatacaattttctatggagattcctggtgccgtctcttttgtctggttctcattcagcaacttcaaagaaagaggatagaaatatcttacgctgttgaagtcttggaattcagatttggcacttgcatccaaatgtttcttgtactattttctacatggctaattatggctacgttttaaaaataaggaacacctagctttctaatatgtgatgagagatgggatattattgaaacaagaaagagtctgtttgggagtcccaaatgaaccctcttttgtggacaaataatttataagaacatagaaacagaatttgagatgtattcttgaaaaaagttattaaaccagatcaaatactacctcgaaataaatacatagcactaaaacatcactatctccttgttttatttgtcttactacctgctttatcatctaccaacatttgtgtaacatctatttcttcccagtaaaatgtgagctgcaagagatcagggacacactgggtaaggagagcatctgtcttaaatgatatctacaaataaagctaaaagagaacagctcaacagacagcagagatgggcatctgcccaacaaaggccagctggagaaatatcaagagaaggtttctaattaaactcttaatttgggggtctatattgcttttctattattgctgtaataaattaccataaacctagtgggttaaaacaagacaactctattgtcttatagccccggatgtcagaagtccaaaatgaatcttacagggcgagtattaacgtgtgggaagggctgcattccttattgatgctataggagagaatttgtgtttttgcctttttcagcttctagaagtcacccccattccttggttcatagcccttcatcccaatgccttttccctctctgctcctttcttcacatcaccttctactcacttgatctgctgcccccttcttacaaggacccttgtaattacattgagcccaaccagatactcaaagatattcttcccatctcaaagtccttactcacatcagcaagaatgcttttgccatgtaagataacatatttatagattctggggattaggatgtggccatctttgagaggccattattctgcctactatagcgttcaatacaaacttccttcccagccagtcctaaatcaatgaaaaaatatatattgttgttgggagcactgaagatccctgtaaaatatggaacatcatttttttggcagtttttatagtcaccagatttctttttaaaattttaaataatctataaagtatctttgtgtaccacatacttgttaaatgtaaattctcatatggtaatataaaggaagcctgtatatttgaaaataaatatagaaaacccttcacataggaaaataaatgaaggagaatattggagagagtttctgagtagcaatataaaactttattgtgaaaactttattgtgattccattttttttccactcattcaatcagaaataggagaaaggatcacactgaatacaataggaattgtcccttgaatataatatctagccagtcttctggaaatattatttttgttactgagctttattgagggaaagagctgttagttaagggttcaaatcctgggcaagtacctagacatcagttgtttaagtttctgatgaagaaagcaagccgctgtatgtttttaaaacttttaagaggaagtagtcacactaacataaaagaaaaatccttctgaagaggcagcaatacacgtctcctggagtgaggacagggtttcagcacctaggtgtcactgccctttaggaattttatccccatcctttcactccagttttggatattttggcataaaaggcacatagcagttcatagcttttaatgagttggagaattacattgaaattcagtactgtgataataacctccaaattaatattttccttcagataaattgcacttgaaaaaaaaaactaatcttactgcccataaagtgacgtaataaaaccacaatgccaactatagcatgcaaaattctcccagcaaatgttacagagacagtccactttctgagtgtttgctctttgtgtttagctattaaaataagggtttaatttaaaatgcatgaataagcttcttacttgattgcagacaagcaaaggaagtaaatattgtttttctttctctcttttagaaagcaaatattcaacgcttttctttcctttgtgcaattgcaaatttagtaggtgtcctgggaatgtaaaggggagttaggggcaggggaggagggtattgagcataactgttcaggtaactgatctaatgtcctgatcatctctgtgatttccctgatgtttctgctactgtgtgactttcgcttatgctgggatttataaccctgtcattcacgaataggtgtttgagaggagccattaaacaaccatcaaagcattaaacagatacacacgggggaagtaccacaagtactgccataagttgcctggagagaatcgctaagcctggcagcagacgtgatactacttggagtaggaatctggggagctgagagttgacaacaatgtccagaggactggaggtgaaagagcaggcagcttgagtgtgtgagacagatgctgctttcaccatctcccacgtgtaatattttcaacacatcagtggagcattagagttcgtggcatgcctagtgacaggaatagaaccatgaaattgtaatgtcttgccagttttaagatgtagatgaataacttcttgtcagagcaatgaagtctttcttatcctataaaaaatccacatataactaatgagactcttgggccatcatacctgctctgttcaatgtcttacactgatttggctgttcaactacctgtggcatttggaccatgaagacaggtattttccaaattgattaacgctgtactaaatttgaatacaaatgcctacatctgagttgcatcctgaatacaatgggcaaatttgacatattatataagctattcctggtgctcctacatcaatgatcagatttccatgattcctttcatacagaaaacataaaaattagctcatgtcacacattgtggagggagactagggatggcaagatgtcagggaactgccattttgactgattgtcctcctggcaatttattatgataatagattgctttttattatatcactgcatttgactgtgatgatatttaactactgaagattaaagacatgtcatgatgccaaaggactttatgaatggactagtacattttttccacacttaaaattaataaaacagacaatcataaaaaattctggaaaaactcagtcactccactaaagaatctacaatttttgtctttcagcatttccttcagttgttgagccaatacatgtttattgtttactttttatatgatagcactaggctaggcaccactaggccaaggcacacttgaccataaactatgaccccaatctgaaagattttacagtcaagtttatcattcataaggcaagaggaaagaatgcaaaataatatataccatttctaatttgtatgctatagaaaataagtgaagtgatgcttacagaaaagagaagcagatcaattatggatagaatgatgtagaacatcattgcagtcaactggtggatggatagaattctcaagaaaagagaagagaagtcatcttacatagggaagtcaatgcgtggagaaaagaatatgcttatgaggggaacagataagaccatttcttaagtttaagggttactgtgctccagacattgtgctacatgatttatatgtcttttcttatttaaccttctcagcaattctgtaaagttatgtaaagagttatggtccccattttacagatgagaaaacaaaaccttaaagaggttacgtaaagtcatacagcttggaagaggaataacttggtctgaagcctggtgacatgactgtgtgtcggctacagtgcaaatagtggctacatgcaggttcagtctaggatggtggctgtgggaacccagaggtagacccaaatcgcagatgctgttctcacgaaaaaatggtcaggactctgtgggtatggagaaatacatgaagactgtcaaagattctaagggttttactccagaagttgggtgctgactttaagacccactcaaaaagagtggggagagtctgttctctgagatcctgcactctctggagttatcacagaatttcaagagcaaaattatctgctgcctagagagcaatattcagtcatccaaacctttggggggaaaaaaagactaagattgtttggtccctaggctgcttacctaattcttctatcaaataactaggtcaagtaggaggatgcttgggtgggattgaggaaaaaggcctttcctgagcctaaagggatttaaaaataaagggaaaagaggttaggaaagactgtgctggagcctagggagcaagagctttgtctaggtaccctaattcagtgaaaaaaatggagcaattagctgaattggagcaattcaatccccaagcgtcacttttgtcttgattttcaataagtgtacttaccagacaaatgtctactgagtacctcctatggaaagtggcttaagagatacaaatatcaattagatacagattccatcctcaaagagtttattgatatttatgggaccacatacccataattaaccctgtaactggggtgaacatgattaatagcttgagctaggcagattaaattatttcagggctcagaagagaaagacttctgtaagaagggacaagggtaggtgaaaggctaagaacagaaggtattttggaggtggtttttgaaatgtatgtgataggctttggacatttagggatggcagaagaaaagaaaccaattttaggcaaaaggaatagcatgaattaaaagattaaaaggtgggaaaacatgaaatatgaatagggaacaaacttgagtacttgggtttgcctagagagcaaagaatacatgagtatttcagaaaatacaggataattgattcaattttgcactatattctgcatatcgtttcatttgtagcagcttatgctgacaccatcgctatagtggtgcccataatgttaaagtcaactcccctgacctaagtgttgctcattgcttctgccagtcaggtcaggtgacacccggccctctttgcaaattcacagaggtgatttggaaaaatgcagacactccatcagctaaaaatccatcgaccgcatatttccccagctattggacatagtcaacgttaatagtccatgtaaatagtcagtgttagtaaaggcagtgtgagactccctttcccacctccctgttagtcttctacatcccttcatggattcagtcttttcttacctgtgggcacaatttagcttccttggatgtgctagaaaaaaaaaaataactatttgatatgagcttatggtaaatttctagaaagtgataaaattgatgtctatattcagaggccctacaaagaaactgttttctcactgttgagttaccgacaaaaaaacctgacactgaaatgctgcagtttcttagtaaaccaggcagctggagggctatgaaccacactgaaaagagtttgccttttctaaattagtgttttgctcaaggggaggagcaggaactaattgtagtaaatattgcctcccagcatttaattctttataagtaaatttacttttggtttaataaacacattatttcaccttttatattcaaatgttgtatagccaaaatatataatattatggttttcttcttaaaggtattaacagaggagtcaacagacagtacagggatctgagtcagtcaagtatgagtatgatatagagaacttcctcagaagagcatttgtcagtgtcacacccactgtacattaaacatagtaaagtttataatataatcttgagtctcatttattgtatctagttataacggatcagctcccttttcatttcttctttaatttcactgtggtaacatgcttgagtgaattcagacatggtacatttaaccaatttggcagtatgccttaggctttttaaacaaacaaagatttgacgggctgtctctaaactcgagcccctcaggtaattcttgcagctgtaaatactacccctaaggtgatttttcactgtactgttgggacccaggatgctataagaaagtgaaacccacacacttcaggaccaatattaattcctcagatttctctcctctttttaagctgaatgttgtcttccctccaacttatgatttccgcaaccctggcactgtattgaattaaattgtaggctgttttttttcactaggtgttgcatgtacttcctaaaagccatcatggttggggattaaatatcttgcaaagttaagacatagtgaatgaattactctatcgtttttctgaatgaacagacaaaaccctcctcatagattagttaactggatttttttcctggagctccttcccagagtagggtataaataagtatatttgtttataataaatacataatttatataaatcaatatttacaataaatatataatatattaaatacaaatatctttttatggctttataaattgagaatataatttaatgtctgaggtgaaattttttaatgttgaaaagatatatacttcaattattttcttcttaaatccaatctagcaaatgatgcctaacttttattatacataagtcaaaagggaaaattggcttttaatgtattttcctaccatgtttaaattgcaacactatatgctaacaaaataaaaatatttcaaagcaagtgtcttgagaggttgcatgtaggccaaaaacaataggaagtatattccacaatgaattaaagacgtgtgaacttaaggttgcttgtcccctgggtaagagatttgtcttgttttgtattagcttggcacctaccacaaggtagatggatcataaagtttgattattactatgaactttttttataacccaaacttatgacccatgaacaccacctcatctctcatctaacagccctttaccttttttgaagtgttaccaaggtaatacatactacaaagcatgcacaacaaaagagatgggaattacaacaggaatatttcatgggcatccaaattgtaagcaatttccataatcagggatttggtagacatctacataaaccttgactcaagacaaaaaccttgtcagaaggatattattttctaaagaaatcaggttaaattacaggataattgcagttatctttacgcatattatttgtggaggaaaacaaaccttgaaatgtgcttttatatagactttatagtggctcactggtattgcatagaattatgaaggcaaaaataagtcaaccaacaaccggatatgccaaaagcttagatgctatcagttgtggacagatatcaatgagtcctctagccaactattattaaataattgcctttccctaatatcattaatggccgaagatacagatttacacaaaataacaaatttcatctttcctataatgcctttgatctttgcaatggcctatagtattgatgggagttggttttcctaatgagggaattgacacacagaaaaaggtaaggatttactaaagatcatagcagcattttgaagttgctcttcttcgcttttgggaaatgaatcctgtctatatgaatatatcctttgaaatgcagagttctctagaatactaattgcatgattagtcaatgctcctgtgagatgatggtgaaagtcctctcttaagagcttcgtgatcagatttgtacatttgtatgctaggtttctctgacctgactttgtttactgaattctgaaattacctcttttgtggttttttttttttttcctgcttctatgagttcactttctatctccatagatatggatttcttcatcacattcctctttaatgtggttattagatatagagtgcagaagatttcatagttgagatagcgagatggaaccaagcacactgttttgaggtttgcaccctcccagtttatctcttcatatggctgcctgggatgggatcatgccttgccatctttaggagcaaggcctttcagctgctgtcagattcatttaaataacccacagtgagtgatgcccgactatgtggtgctgtttgatgtgcagaaaatgccagggtgcatatggagagtaaagccctgataccttgtttatctcattttggcctcgccgaatgtgctgcctctccccagcattccatctcaatttactgaggaactgtgagctcaaggaacttatccaaagtcacacatgagtggcttaccagaattcataccccagaactgtcatggttcctaaatcctttattatgagcattataccataccatctccaggtctcagtattaacatcatgtaaatttattctccagcatgattcattaaaatgaaaatgggccattctctctgattctccaagcacttcagaagaagcgttacatcctgaatacagatttcatttctgtgaaggagacgagaaaagaagctaaacctttgcttgtattggaggctggttcaatttttaagggcttttatgacagttttcagtttaaaatatttaaagaaaagccaagcagtgttaaggttaagaacagctacaattgcatttttaacagtaggtaaaacaaggaaactaaaaagtgcctgtaattcagtggcaaaaacctaatgaatcccctctggataaaatgttaatgtaaaactaaatgaaaaagaacacaatcaacctgtgctagacacccactcacattttaaaatgctttttgtcatcataaaatacataagcatcaaatgccttttttggcggtatctcattttttgtttaacgaattaaaataatattagagcaaccacttatatgtagctcccagtataaaacaatataaaaagaaataaaactcaacatataagcatgtttgaaattatagtgaagaggtagaaaggtgaaaataaaaagtggagaaatgtaaaaatgtgattttatctttttcttctcttcagtaagagtccttccactttgggtccgttcttctttttaaaaaatatagagaatacttgcccttttttttacatggatgcttaggttaactattatgttcaacaaaaggcacttattaagcacccatatgtgccaagtagcagaattggcactatttggaaaatatcatttcctctctcaaggaagttataattttgctgtggaacagagaatacagagaagaaaatgtcaagtaagtggcacacacggtaaatattgcgggtgttttgatgagaaatgcatgttacagcaaaaaaatcagccttccaaatcaaagcagaagcacaaaagatggttacagacagcggaagagcctgactttagggttccgatggacctgtttgcaaataccatctctaccacgatgagttgtgtgatgttgaacaggacttattccccagatacaagaagggatgatactatctacccaatagagctattttgagtattaaattagaaatatacacaactaactttcccatcaatggtaacaatgattctagtggtggtagtaataagagcatttttcaaactcctggaaccagtgacttgtatagaaaaagctctgaatgaatttcaattcccttttctaagaccccttttacctgcaacaccatctaactctaattgcatgagttgaaccttaagtcaaaatagatcctgcaagtttagaattggagacagacatttcatatgtgaataaagagtaaacaaagtctggaatttgaaaatacaattagggcctttaagaaacgatgaacatactagattcagggggtaggtgttgattgtaaagtactaccacatgcgttttgaaagctgatgagctgtctaaatactacatatggtaaccgctatgtagaggatttttttctactacttgactttgaaataacttttctccatatgcatgccaaattaatatagcagagggagaagttcaattcagttcacttcatcaagtatttataattgcagaatgccagaaaaggacatttttcttgatcaacatctgcattccccttccagtaagtcccaatagacttactgtccatattgctgttttctgcataaataggaaatcttggaggtttggcctctatactctcctgaaaccacatatgacaagtagaattgttccttgatacactgagattagatgattgccccagccttcagatcacctgatggagagaactggggacagactaggaagggggcagtgatttttaacaactgggtacaaaagaacacaggcagagccacattcatcagtcattcttctactcctccctggacactacctactacaaattttgcctttctttatacctcccagttggaatcttgaaatttttttcctaagggcctgtaaatgtcacatatataaatatagggatttagcacataatattatagtattatgtgtccctaacgaaaatgttttaggtgacaagagcttcagcaacatcacagaagaacgcagaggtaatcaaaagaccatgttcagaaaaaaaaaaaaaaaatcaactctctaaaaatcttgttgatgtcgacacattccaaacgcaggaaacttaactgataaagtaaaatgttctatttagcactttgacatcttttactctcttccgttttttttgtaattgaaaacatattttatggttgaaaataaactgttactcaagtgcatgaaaattaatttttaggaataacagtttggggaaatgcaccaaaataaataccaagtggagaaaagaggttccgaatctaattctcgaggaatgtcatttctctatagaatcccagtaagtaaataggcaaagcagttttaataaaagtccattccagagtaaacatagttaacaaacatacatatagaaagatgtttactccaggcatagtccaagaaacaaatacaatagccttatgatacacatgatttaaaagtttaaaaatgaaaaaaagtgacaaaatgttagcaaagttgcaataagtctccatattcatttgtttttggtagcattgaaaattggatgattcttttagaaaatcataggtgaaagatgacaagtaggtaatatttagcatgctaactctgactttctgtttaactccagtgctgtttggcgctctgtgctgataagaatcctaaagcctcgtgtggtcttagcgggaaagagcactaggctagacgagaagtgtgtgccatgggtaagggaacaatagtaagaagtaaggataaatggttttaacattccttgatttaaaaaaactccagtcctaagcaaatgtttcaaacaatataaaaaatctatttataaagaggttcatcacagaattaactgtaatggcaaaaaatgacaactttaaaaacaatggaaataggccgggcacggtggctcacgcctgtaatctcagcactttgggaggccaagacgggtggatcatgaggtcaggagatcaagaccatcctggctaacacggtgaaaccctgtctctactaaaaatacaaaaaattagcctggcatggtggcgggggcctgtagtcccagatactcaggaggctgaggcaggagaatggcatgaacccgggaggtggcgcttgcaggagccgagatcgcgccactgcactccagcctaggtgacagagcgagactccatgtcaaaaaaaaaaaaaaaaaaagggaaatcgtttaataattatggtacctcatcaatgattttcatgtatttaaaagtatgattttaaagatcatgttgaagacaatttcctccattcctccgttatatttttccatgtaatatgcccatatggtaagcaaacagaaaataataactaagttggttaaaaagcattaggagttttctgccactgagatcagttttgtatcatccctcaccctctggcattttaaaaaataatacttatgattccctgattctatggaaagaaaagcatattttagcacagttgattctgtagaaattaaatttcaggtatatgaatttaacaaattagcacgtcatcaggctgattgtttgatctttcttaaattagaattaataaggctggaaagaaattacttccagctcgtgcctctttatacggaaatttgctaatgaaacaaaacctcaaactacttaagtatgaaacaaattttcatgccctgcattttcaggcttagtattaaagtagacaagcttctttgcaaacaaatttttcagagaaatcttcaagactaaattacaaagcacactgcattttctgcagatttgtggtaaaccaataagctatgcagcaagctgctactagaaaaacaaagcgtatcactttgctttttcagtttatttatgtgtgttttggatagtccctagtattgcatccgaaaatacctgttacaagatgttcttactttcattgatcactgtcataacaaaaaattactgttcttgtaacatttctataccatctttctaaatattattgcaatgaatgctaattttaaaaaatactttattcagcaacgacaaataaaagcacaaaggatagttatcttttaagatttacctttaaatatcacacagaattacatataatgttttgcaaaatatttgatcaaaatgtttgatcaaatattttgcaaagcattatacataatgagaagcagaagatgaaaatttggaaatcaaataagcttttggatgtataaaacagtagcctaataagtacatgtatggggtttggaaaagagattactctatatagttcaagtctttattgtagtcaaacaaggaaattgtgagacatcaaactggtcatttaaatcgatatgtgtaaaatttgtgcagttgcagtgtctctggaaatatcaaattgacttactctctctacctcaacacaagcctcacaaacgtgtctctattagtccaatttcatactactataaagaactgcctgagactgggtaatttataaaggaaagatgtttaattgactcacagttcagcatggctggggaggcctcaggaaacttacaaacatagcagaaggcaaaggggaagcagccaccttcttcacaagacagcaggaaggagaagtgctcagcaaagcgggataagccccttacagaaccatcagatctcttgagaactcactcactatcaggagaatagcatgggggaaaccgcccctatgattcaattacctccacctggtctctcccttgacacgtggggattatggggattacaatttaacatgcactttgagtgggacacaaagcctaaccatatcagtgtccaagaaatgtgtgccacataagttcctaaatgactaactggagtaagcctatgtgatggtaaattattttgttataatgtggtctaattgatgtgagctaatatgccttaatttacattgatagtaaattactctattggactatgtcatcatcatttaaccatttataaaattgtatttgctctgccagcctcaattctatcaccgcatacttttggttatagaaaagaccagttctaaaaataatggtaaacttatttggattaagggaatctaatcatctttatacttatcatgtatcatggtactcaagcttacatatttttctatcttcctaggctgtatttacacaacacgatatataaataccaagcaatacacatgtttgggttatttaaaaactaataaaaaacaaggaatattttagatcttaaaaagccagtaagcaaatcaagaatttatttttagaaagctgatcaaagtttagataaagaaatgactgaggaatataaaatttggaaagtaaggaaaaatcattttaatctttatttgtacatatattggagtctaatactctaacaacaatacatagtaccacaataactcaaaaaataaagtttatttctccctcacaatgaccgtctaggcctgcagaacagatgaacagctttgatccacacgatcactcagagatccatgttttttctattatttaattctgttgggtcctctgagaaatagtcattgtaacaaatgtaattttacaaaaaaccttatttgatgagtggaagataaaacgaggaagaagcaaaattaggctacagaagccttccaactgtgctgcaggtccgaaaactatgaaaagaaagaggaaaggaggcaagattttgcacagcaaagctgagaccatcatgtaaatctggtgaagattaggtcagcccagtgtacatctgcagagcaaatattgcttattatagaagtctcatattgggcaaaaatgggctgaccctaaagccctcactgtgctcaatttttggctgtggctgcccaagaacaatgtggccttggcttgaaagctgaggtaaatcctgaaggccttaacggttgaaggtgctcagccaactgcctatcttgcaactacatggcaagctcttttcttaatgtgagatctgggatgaatgcctccaaggctgccatattatgtaataaagggagaatgggttcagggtacaccagctgttggcacaatatgcatatatatcccattagtaggaatagaatacaaagaaatattgatttaataattggttggatcctgctaaatctatctggaagagggctgtatcagagcagtgagtgtcatgtgtgctcttaagtttgagaaacatttatagttttttcctttttcagaccagaactgatatagtcgattagagagtagaatttgttgtcaaatttgtgatattttaaaatttataaacagacactacatagaatatagtttttcatttgtattgagatttagctgaaagaataagaaagagctaatcagggtcctttgcctgaattccccacaaataagctgtaatatggagaatcagcaaggataagtgatgaattttcctgattaaattaaaaatatctctgcaatgtatctctaacactcacagtaaaaattcttactctctattgctgtccagatccaactactagaattaattctgaggaaaaggaacacaagagactgggtttgaatataaatatttttgtccagatccaaggagttaattcagtgaagaaatagcttccaatccagagagataaagaataatttctactatttattgaaagtctaccatttattgacatatgtcaagatctttctatatgttgcatgtaatctcaatatccctgcaatcagtactgttaccctcatattacagatgatggaactaaggctcagagttttactgattacccaaagacatatggccagtacagacttaacctggtgttatactcagatctcagtcatccagaacccatcaatttttaattatgccattggctttctattaatgaacagtcctttggaataagcattctttccttttcttaagtgtttataattggtcagatttgaaaatttttgctttttaaaaaaagactatagtacagtttaaatgaatgtgcactgtttatggcagactctagtgcttgctagagtctgtttattttctagaattcacacacgggggtggcaaggagtcagatttagtttagaaaaaatatttaaataatgttttaagacatagaagttttgttaagtctcttataagaaatcagaacgttgtgcttatatatataaacatatacaaatatatacatacatataaaattgtatgtgtacaagtatatatgaacacatatgttcatttatatacacataaatgtagacaaacttgaaaacataaatttaaatatccatgataccttctgtatccactcagacattattatataattgacattcctcattcctggcctcattattgcttgatttaacgatcaagaagtagaagaaagacacccttggaaggttaataagccatccagaaaattagattagaatgatcaaaccttaatgattattgtttctcattataatagatcacctaaaagtttgaggaagaaaaaaaataaattggcatcattgggcaattatacttgtagttttccacagtagattttacggatgatcaccagttatgaatccttttcatatcgaaaaccagagtttttttatacattatacttccattattatagtaatcaaaggccatgtatttgatcatcatcataatggagtacttgaggcattttcttctttgctaattgacagttggtcagttaagaagtgcttttcacaaaatcttccataaccttaagggtttgaattagcttgtaataaatgcctgagaagctcctctagattcttaagtgcatttgctaaaactctcaaccgctattttccaccttctggtcaggaaatgcctttgatctgccatctagctgccttacttgcatatatctatctgtctcaagcattgtaaccctactcatcagcacagtgacacattaccatttagatatcattttctgatgaccgatttctctgaaaaagaaaatgaaatgctaacagtaggaaaagggtcaaactgaagctcggattgtcccatttggagaattgcaggaggtggtatgtagtcagaagactgagccctgagcttgatcttcactcccactttaattacacacctaagcacttcctgtgcagactttttggctcactggctgctccctgatcactcacatgccacttcaccatctgtggtgggacaccctgccccagagcctgagttccacaatatcaaaatccagtaatacaaaattgcttccttcaatttcactctccctgccacttaccaatgaggtggtgctagtagagggtgggcaagggagtgaattggagaaatgggataaatgaacttgctgcttttttaaaaggaagagtgcagtgcatggtcttaaagcatgatgatactataatatccatagtgacagggactttatttagctcagttttctctccattctgccacttacgtgtttagtaagtgttggtggagtaaatgaagacgctagagagattggtttatatcattgaattaaaaattatatctagttttacttcgattctctcatggcattctatttttaagtaaataaagatttagagaagatatttgtggtgcatgctcccaaatattaggaatttaattgatcagtctaaaacctctgttaataataggaaaggaagaaagagaataggggagacatagaaaggagaggacaataatgcatgtgagtttctcaaatataacagagcaatagatatttgagtaaagaaagcttataactataaatatatacctataaatactaagttggaaaaaaagacttttatctctgacaaaatttagtaattttattctttttcttatgtaataaatattccctaaatacctactctgtgccaagtaatgtgtggctgctaacacacagcaaaatgaaacagattatgcccacagagagaccacagaggtagttccttacacttttacttctttccttctttgcttccttctttccttctttgcttccttctttcctttcttccatctttcttttcttcctttatttgttcctcctttttctcttccttcctcaagtacagaatacaaagtccacagtatgaaaaatgaaatgcatccttagtatctcccgcaatagttgaattaatctggaaaagttagaaattgaaaatctctttttctccactgaagttagcttcttcagtgtgcttcctaatatttaaaataaatattttgcaattagggcaaaatatgttagtgacagctgcagaggctgaaggcttctatttattcagatacccatttatctccaaaatatcaaggcaatggcagattcccagcttatcattgcttctagatgtgaacacataattaaatctctatatgccttcgttttgctttaatctcattcctcaaactgctagtaatgagagacctgttgatgtcagttgggaaggtaattctttgtaggaaatttttagccaccgaaaatgaagtctgtcctattacaagtaatatgctgctcaagggtcccatgttgtctttgtttaaactcacagagcaaaatttatacatggaagaattaggcccccatgaaaagaaagcacttttgcaaggatatacatagtatgtatgttatatttatatatatatatatatatatatatatatatatataatagtactgtactctgggtataataattaatctcagtggatgagataggcatgctaatccaaactataaatataattgcaaatatagaagccagagcctcggacagaggaaccaaagatattcattatagcgacattcatccttctgtgcctagttcgagtattctaatctgtggaacctcaagccacagtaatattgatgctcgtcattaagatgtttagagaataaattagaagacagctttgtttgagctcttgggatacaatgagtatgtttttattaattaaagttttctgttgtgtttgtttatttatcaagagaaatatatacaaaaataacacacatagacacaccacacatatatgatcatagtaagatattctctccacttcatgagaagatgaaaatggcagtcatgctatctcttattttataaaatttggaagtctgaaaggctctaaaaagccctgaattgggaagattgattcatggatgctattatataatgtattcgagttatatacttgttagagcagcactacccaataacattttttgtgttaatggacatgttcacagtaaccaccagctacatgttgctgttgaccagttgaaatgtagctagtgcaactgagaagctggatttttaattttatttaattttaattaatgtaaatttaaacagctacaggtggctactagcttccgtgttggaaaatacaaacctagaacatttgatttccattttttaaaagacttgttttgttttaataatagtaatttaaaacactgcttttagacaaatattaaccaaaaagatatataaaatagtttaattatcattcaataaatatttatagaatattttatgatcacccaacaaaatggatttttgatgcttgcaataagattcctcctagaaatttagagaccaaactcactacattctccaccttctcaccaccccttttcctcaacatatgaggttttgtaatttgtaatttaaaatgttaaaactaaatataattattacaaaagtgagtcaaaccttctcagaactaatagcagcaacttaaggcaggttgatactcaggtttggataaaccacaccaagtgacatattaatttctctactggcttcttagaagaaagatttgaggtcagaaaataaaggaactataggtacccactcttttagtcatctgactatttgatttatttgatgagtgatctcagttgaccctcccaggcactgaaccatcagagagttatgctgctttgtgataagaaaccttgagagatacctaaatcttcttttaccactgggagttacatctattctggaataaagaacatttttatgtatggtgtttctatctagatagctgtagaaatattcagaaaagattcacagacttaaattcattctgacaaagatcttaaaattgtataatatttaccaagaatatattagataacaccttattttgttttatttttgtttcttaaaaggtgaaggaatggttaatgtattatacattgagaagtcaattaactttcattagcatttgtttttctgtattttcctcagagacaaaccaaaaaatgaggaatgtttctaatttgatctctggagtaatcatagatatggatattgtatcatttaacagacttactaaacaaactagtaggttttgaagtgtacatttctacgcaccaagaatgcaactggcttcttaattttcctgaagttctgaggctggtttttatttataatctaatgttgggctgctgatgatatatagtcttgagtttttaaataggagttaaatacaagtaacttgcttaaaaaaaaaaagttgaaatcattcccagctgcactaaaactgatgtgtagtatatgtttttaaaagcaggtttcacaagtgacacccttggctgttacatcctatcccacccacagattcctgtcaacatatagcagttttcactaaggagatttcattgtttatagtatactcaccttgccctgggattctgccaggtacagctgatataaaatacacactatgattaaaacacatcttccccatttaaaaatacctcacctgaatatttttttcatttatttgcacaaacccacctatatacacagaaatcactacctcaaccatctgaccctcttaagagtaaagcaaggtacatgttttatttggaaaccctttttaggcaaaggaatgtggttaacaacctttctctttgaactgcttgtcaggcagtgtgggagcagaggaggaatgagatttgtcatgaaagacagcccatgcttctgacatggaatttagcaactcaggtggagtcctcttcatttggagtacttgtgttgtgctggtggaaggtattcctatatagaggtggttttcctgaaaaaaatgaatatgatgcagtctccgtggactactatatagactaaatctcttttcctctcccttctctcccatttaaaaatgctgtcaataccagtgcttgtacatccatataatcccgtaagaatggtgcttcagatacacaaagagaaagcatttgagtatagagacaaaatcagttgctacatatcaatatttcacaaagttttaagtatttcgtttcattaacattttctttgaatcacaccacatatttttcagggaaaaaaacttctattcattttatctaatctaaaaatacgaatatgcatgaagaaatctaagcagcattgaggaaaaatgaaagcaacagtacaggatgttgtgtgggtatgaatttggtcaggaaacagaatgtgtcttgagatagaaaaaaaatgtgttgcttttttttccccttttggggataccctgaatcagccacaatctgatctttgtatcaaagtgctttaagttttttaaagtatgcatgtgaatgtagcttttaaaatacaggtgattattagaaaatatttcctgtatgttctgtgaaagtgaaattgggcctatttaaggatacaagaacttaggtatattcttgcaccttttttgatagttattatcaatattagctctatagaaaaagtaaggttaaattgttctaaatgttccaacagtttcttcctatcttctgctctgctagagagcaacacctctcaaaccttatctacttctactctcacctctcgtataaggctagcagactatatattccttgcttcatactgtattttcaaaccattttcaatgcaatccagcattactacccaataaactgcttcttatttgaagttcatgctatttgcctatgccacctttccccatactttagttataagctgctgaactccacatcactatcatttttctcagtgactcagcacgtaacttattttcatatttagtcggccctctgtattgtgggttccatatccatgaattcaaccaactaaggaataaaatatttgaaaatacgtggatggttgcgtctgtactgaacatgtacagattttttcttgccatcattccctaaatacagtataaggattatttacgtagcatttacattgtagtagtataagtagcacagagatgatttaaagtagatgagaggatgtgcataggttatatgcaattactacacaattttatattaaggaatagagcatttgtggattctggtgtccacaggagttcctggaactaatccctcgcagacactgagagatgacggtactcttttttagggtaaccaatcaggtagctgggtacttgagagctaatggtgaaattgacacgtttcaggtttctaagaaggtattaggtctgtaatatagacctcatcctacatgtaagaataagcagattgcatccgtgccacttagcctcatcttgtaaaatattcaggtaatgctaggttatgtaaagttaggcagtagtagaacatcccccaaaatttagtggcttaagaaaaccaaggatcacttttcactctcactacttgttcactgcagttggttaggcaagatgctatgtggggcagctggctctgcatattgtagtcaccagaggacctgggcagagagcagctatcttaaacattgacattacacctgtccccagtacatcagtaaatcttgtcagttctcttttcaaattacatgacacatttgacactttttactatctctctgctgcacagcctcctaatttggcctcctcccttacttattcaaagcattcgctcagtagggaaagagtgctcttcagggtctgcaacttgcaattacatgctataccctgaagtgaccccgtgtcactttccactcgacaactcattagtcagaataaataatgtgacccagtcaaccacaaggcacctaggaaatgcaaacttgccttatgcctggacatttagtacacaactttaataactaccaaagggtctatttgatctttcttctcaacattggccccatagtcctcagactcctcaacttcggtttaaccatctggacatgtggttacaccttgttattacctagaacttctatgatttaaagatctcagattctgaaatttctctctctgaccactagttcttacctctcaagccccatgctaagatggatataaaatatgtgtaaatccctggcaatgtgacaagtataattgcagcataagaaacatgccaagaggctagagatgaaggtgagatggtagggtgggggaaaatcatgaaagactttgaatacaatggtaaagactgtgaattttcatccttaaagcctttgaactaaacaggcttgtatcttaatcagacttatatttttaagaagtcattcaaaattgtttattaacctgtatttcatagttattagaaatacctcattggcttctaaactgaggcataatcttaaattatatgaacagcagtgaagccctacaaaacatgagtttcaaaaattttgtcattaattccatcagtgtgactcacagtgttatggtcagacggatcctttgacatttaaaatgcttcttggatttattattgttaccaatatgctttattcattcacaaatctaaatcatagtttatacctgaaaattttagcttatgtgtccttcaatattttgtataatgtcctaaaaacaagcattaaacaaaaataataatggtgctggttaaacctaaatcttcatagtttaggccaatagcaattttccccccaaacgtgaagacatatatatatatatatatatatatatatatatatatatatatatacacacacacacacacacacacacacatttttctaaatctagaaaaaacagggaaattgattaatttccaattatattataattaagttataaggcgtttaaaaatagaaggtccatgaaacttgatgcagctaggaatgaaagcagtttgaatttaaaaacctaaagttgaaaaaattagcctcattaagaagttctaaatagagcattgttaatttttaaaaatttatctctttgcatttatctctggataaccttggtgatctaatggcagtaaaattttctctaaaactcatgcaatttttttaaaactagatgtcttttccacaaatatttattttcactttgtagtttcagactgagctaatggtttcgtaagcagacatattgattagttcaaagtcaatttctaacctattccagctcttcagctttcttagaccattttgtggggttttttttggtttgttttcttttttttcattttgtgtaagatgggcatgtcttctttcatacctgaaatcaaataaatctgaccttcctgtccttaaatgtttgaggatacatttttcttcttgttatctattttttttgtgtgtgatgatttaaaatgaagtatgtgaaaacactttggatgggaatgaaacctaaggcgctgggacctccttaattggctgctagtggagcaaattccaagatggagcatcactacagaggtcttcaggggttctagcgggtagactataaattattgatttgaaaccagagcttgaggggcagttgtaagctggaagagggaatcacaggagtcactgactctaccacctagagccaatagcaaaagagaaattgtagagatgaaatagggtctctcaatgtgagtcgagtagggggtcaaggaaggtatgtagctggatctagcaaaagactgaagctaattacaggcactgaattccgtttttgccattctttctaatgttttggatattgtaattccagaagaaaaaaaaaaaacaggaactgggccttaagtaacaacactaggctggaaaatattacaggcaattcaaaaaaattattgctacaactaccgattttataaaatatgttgacctcttaaaattggctttttatattttttgctactcttttatttcattggtctatttataccaaataagttatatatttaaacaagcctgattttttaaatttcttctttacctcgacttagaagttagacttagatggatagtgtttcaggcttacagtgaaaactaatgcccatagtaggcaagtactaaaagaaaaggataaagcccttattttgtttttgtcttcatcaataagaaaagagagaaaatagcactttagtgctttcttttatccaaagtccagtgcactaaaacaaagaggctggagctccgggcaatttctgaagatatctaccagggacttcttatttatttcttacttgctcctttgctcctcccttgatccttttactcctcaatataagaaaccaaatttagatgtttcagggaaagactttttctataggctccataatatttttatctgtttttgttatgctgttttgtgtttcttattcctctgttcatacaaagatttctacttcagcatcattataaggtcaaaaattcacatttgagatgctcagccgtggacttccttcaaagaaccatcttacttggaataagagaatgactttccttcacctttaacactttcttaatgataacgccttagagtggcagagcaatttagaggttgcaaagcaaagtcacacatcctcctatttaatgtgctccacagcctgtgagctgagcagggcaggcatctcattttacaagtaaaagttctgagcctcaagaaagaatctgggcaacccaactctactttttttcgcattaggagaattttgtgaagatgcaagtgcatttagattaattaatgccattttcagttttaagtgtcactatcagattttcatttcagtaagtgacatgggagatatgtttaagaaaggcaggtttgttaagtatagaaatcagctagttagaaggtaactttaaaatttaggcaaggtatgataaagatctcaactactaccgtggtgacagaatgggaaaatatttaggacacaaacatggagtaagttattaacagattgtgaactccctctaccaaaacaaatttttagtaggttaaagttaactcaattggcaattaagtctttatttgattattcaaatgaaacttgctctatcacaaaatacctttaagttatcaaaaccaaatgccatttgctaaagacatacagaagtgtaagttaataaagatacatctttattcattagaggcttactaattagaagaattaagtacaaagttggcaagcaacaaattgatgtaaggaagacttagaaagacttaggtcttcctttattcacattaattttcctgcagtatttcacatctttttccttgtcacatcacctcaactgatgacctccttaaatgtaaatacaagagagacaatgaatacaactagaggagatcaacttcatcttgtcttttcagtggcaccacctctctacatatgtacccacatactctgccatccctcttcctccaggagaagacatggtcctgcctctaagaccaaccactacccctctgtctaaacccaatccctactttgctcctgtaattatcccctttccttcccatctaactttgttcctctatgctctatgattcctcttagcatacaatgatgcctcaacactactcttccataaaatctctctcttgaccctacatttttatccaagtaatgatgcattctctgttctcctcattagcaaatcttgcaaaagtattggctacatttgctgtttccacttagtaacctcccaggcttttctcaatctcctctaactgggatttgccctccagtagcccaagcgattgtttataatttaccaataaaaaagaaatttctcatctttcaggaattaaataaggaaaaaattaaaaaccatttatatgaatatgcataaaatgattcaaataaattatcctgggaataacaaagctatatttaattataataccatagttgatatgatatattttcatgaagtctggcatagtaacctgctctaaatgaattttgctatgcatgatatcaggctgtctgccttccttccttcatttcttcttttcttccttcctgacttcattaatctctttctcctttttaaaatgaacttagtatcttcagttgtaactcaggcttagatgataatagaattgtccctcaacatagtagctttgtattaatctcttaaattatttttcattaatatgcaaagataaattatatgtgatttctaaagaagctttgtcaagctctagcaaactagcttaattatgaaaaattaaatattctgtaatgatctcttcttttgaagtctttaatatgaaattacatttgtttaatcataagcttggttcttgggcttttcaagtggattttagaaccgtaaaccgttatgtttaagtgtaatttcaggcttcctttagtttttggcattaaaatcaatttaaaattaaaaattatcagtggtgatagattttttaatcaaaaagaaacaaagataatggatttcctccctaaaatctgaacacgttactgcactatgacactgatacatatgcagtattaatttgttttagttttatagataacaaaccaaaatgctacttcttgttttcccattttaataatacgatgtaacagtataactattattcatatggctcatatatcataatctatgaaaaaaaaggaaagtgttttcttgttcttatttttctttaaagtcatattggggtttctagggaaaatttagaaaatgttaaagaaaatatgactacagctcaaaaacaacagcttagaattgtctgggcctctaggaactgtcaacagcttccatcatttaaatacaacttactcacatgtgggagaagcatatggagggaaaactcacacaagatgcaaaataggcaagttgtacaaattaaagaacagaatggagagtttttatttaaaattttctttttatttttctaagtcaaatatgtcctttatttgagcgtaaactcacaattcagattttttgtgataatgagacaataatttttataatttattcaaaaagaaaaattgttcataactcgatagtcattttagctacaacagatatattaaatgctatcactcatcatttatttatgtaaataaagtaaaaaaagataagcctatcaagaactattttgttacctatttaagaaaaaaacacagaccactagattgatattgactaaaatagcagaaatgtgcattctaaagtttgagataaccagattaatatctgcataaaatgtgtgtaaaagctcttttctcagcctcgtaataatttaaatgagtgtagaaccagtatttttgtgtcatattttaaatctagaagtctcattatttttgttaacataacctgttagtttcagggactgcctgctttatttcacacttgatgtatgtaaatgcttctatttatgcacatttatactgcatttaatgttatgctatgcttaatttaaatgggacgtcttacatgtcagtaggagagaagtactagagctacatggaagataaaatttgaaccatgcataaagtaggaagagtagcgttacattgggagaaagccaaaatataatagaagaaacacaccttaactattatcaaatctaagctgacaaagaaagaaaatattagaaagtttaaaggcagatttggagaaaattaaaaggagatcttggtttgtgtaggtaagtaaagcaaccaaaatctgaactgtggaaagtgatgtaaaaatatttatttccttagaatttatcaagaacattgatccatattttattagtcagctttcattaggtaaagctaaaattacagatgacctcaaaatcccagaggcttacagaatcaatggcatattccttgctttgataactaaagtcaactgtggctgtgctctatgtatcttttccttctggaactggttgaaggaacagcccatattttggaatgtgtcttttttgtacagaaggaaaaagcaagaaagaagaaattcacatgatagctttttaatagcttctattaagaactctctcaattccactcacatttcaatggcaaaagcatgtcagaaaactaatgatgatatcagggaactgcaagtcatgcagctatggcaagaaacatataatccttttatcagaaagggaggaaagataatggggggaaatgatacaatctactgtgcatcatatgccaaaagtgtttttcatggagaatgtggtactatagataagtcttgaaaagttaaggcaaatacagaacagacgtcaaatcatttagtagcgattggcaggggtcttcattagtatagaaaactttagctttttgcctttgaaattaacacaaaagagtagaatggctgtataaagtaaaaataatgttttaaaaggacatgagttttatcacataggtagaaataaaatacatgacaataagaatgcaaagactggaatatgataattagaaatatattgtcataaagttagtaaatttttcatgaagtaatagaataatttaaagatacatattgtaatccttaaagcaaccaccatcataataacaaagaaacactacttccccaccaaaaatttattggagataaggtaaaacatatacctaagaatactttattacacacaaaaaagaattggaaacagagaaacaaaagattggtcaaatatgaatcaaataccaagttggtgagcttaaaactaaacatgtcaataattgaagtaaaaggactaaacacgctgattaaatccagactagatttttttttataagttagactaaattgtatgtcgtttaaaagaaacacattttaaacttaaggaacaaagggattggaagtaaaataatggaaacatcaagcaaaaaattaagctggtgaggcaatatgaatatcaaaataaagtagatttcaagctgaatagtgctagcagagattttaatggggcatttcataatgataaaagaatcacttattcaagaagacataagactactgaaagtttatacccccaatacaaagctcccaagtatgagacaaaaactgacaaaacaaaagagaactagacgcaaatttactgtcaccaatatagattttaacactattttctcagtaatagataaaacaattaaataaaaatcagtacagttatggatgatttgaacaacactaaccatcaatgtaagctaattgacattaatagaaaatcattccacactagagcaagctacaacttctaaggtgcacatgaaatactcaaaaagatagacatatcctgggccataaaagaagttacaatacatttcaaagtacctaaattaaacaaagtatttaaataatacaatgatgataaattaaactattaaatttaatgaagatgaataaaaataatatacatttgaaaaccccccaaagatttggaagttaaaaacacactgctaaataattcatgagtctaagaaatctcaaaggatattccaatatatattttgaacagaaatacatgaaaacacaacatatcaatatttgtggtatgcaactaaagcaatctttagaaggcaatttatacattttaatacctatatgagaaaacaaggcataaagtcaagcatttctacttccattttaagaaactagaaaaataataaattaagtcctaagtatgtagcacaaggatataataaaaagaacagaaatcaataaaataaaaaaagtgaaatagccttgtataaagaaatcaaatttgtaattgaatagcaacaacaacaacaaaaaaaaaaaacactcccggactagatagtttcactagtgagttataacttatgaataaaaaataatactactctgacacaaactctcataaaatagcagacgtgggaacaattttcagcccatttcatgaagggcaggcatggaaaatacaagaaaagaaaattacagccagcatatctcaagaaaatagatacaaaaatgctctacaaaatattagcaaatgaaatccagcaatatattaaaaagttaatataccaagatcaagtttgacttttcccaggaatgcaaggttagcactgtcaacaaaatagaccgagaaaaatattgcaacacatatatctgacaacagatttgtacccaaaagatattaaacattcctgcaggtggagaatttaaaaaccaccaccaacaataatttttgccttaagattcagtaatcctgctgctagttatttattcaagagaaatcaaaacatatgtgtacacaaagtcttttacaaggatttgtacagcagctttattcataaatacccaattataattttcagtcagtaactgaaaacaacccagatatccttcaacaggagaatgaataaataacctgcagtgtatcattcaatggaatactaagcaataaaaagatataaactattgatacatgcaactacctgaattaatttcaaaagctatcattttgagtgaaagaaacttgacacaaaaattacatattgaattattccactgatgtgatgttctagaatagttaaaactaatctgtggtgacagacatctgcccatatatagacagggtagtggtagggcaatgcctgggaagggtaaccagggaactttctgggatgatagagttgttctatgtgtcttgatatgcactcctcaacactaattaaaggctactgagttagtccatttgcattgctctaaaggaatacctaaggctggataatttataaggaaaaaaagtttattctgactcatggttctccaggctgtatgagaagcatggtgccggcatctgcttccagtaaggcctcagggagctttttactcatggcagaatgcatagtggcagcaggtgtgtcatgtggcgagacggggagcaagagagagaacgaagaggttccagactcttaaacaaacccagactcttaaacaagcagatctcatgtgaactaactgagtgagaactccctcatcaccaagggtatggccctaagccattcataagggatccacccccatgatgcaaacacttcctaccaacccatacctccaacattgaggattacacctcaacatgagattcgtagaggacaaacatccaaaccatatcaggtacccttaagatctgtgcatggtcatccctcagtctcctcaggggattgggtccaggacccgccctccccacagtataccaaaatctgtggatgctcaagtccctgatgatataaagtgctgtatcctatgcacatcctcacatataatttaaatcatctctagattacttgtaatacttaatacaacataaatgctgtgtaaaaatgtgttatactctatttttatttttttattattttttatttctgcattattattttgtactttttttctgaatattttgattcaagattggctgaatttgtgaatggggaaccagcagatattgatggatgacttcatttcactgaatgtcaattttaattgcatttttatcagagtgaattacaatgcttacccatgtgtttgaacattatagttcactgttttcagaaatggtataacaggttaagaatattataagagtcacaggaagcatgatagtgagaactgggttcagcaggcacatcatcatgtaggaccagcaagaagaacagggtggtgatggaattcaaccttcagaagaaattaccagggcagagagatctgagagagaagtaactcaatcatttcttataatccctccgattccaaacctccctaaaatgattaaatacattttaatggcagggcagaatattagggataatgtgctttcagtagctccatttccctcacccctcaaatttccctcaatcgcttgccaaaacctaagtttctataaaataatgggaaataattatcttactttgcaactcaaaataaaagagcttacaatataaatgcatggttaagataatactttaagataaatgaattttattcctaatcagtgtatgaatgcaaataagcactgatctttcctgttactggtaatgtagaaagaagagaaagaagcaacagtccaatttagcacacatttactgagagtgtaacatgtactaaatcagtggttttcaagcttttgtgactgtgacctttactaagaattgcaatttatattgcagccctgcatgtacgtacatatgtataactaaagctgtgttataaaataaaacatgtacttgctaaataagatggagtctggtacttactagactagtatagtctgtttcatgtttacagaaatgcaagtcatgatgcattaatttcaccacccgctaaaaggttgtgaactgtggtttgaaaaacacagtgctattctttctactcaaaatgtggtctgtggaccaacagcagcagcatctggggacttgtaagaaatgcagaacctgagaccatacctcgcacctaatgaatcagaatctgcattttaactaaacctctaggtgcttcctgtgcactttaaagcatcagaagccctgtgctagacgatgcctgaggaggatgctctggacagatgaagtcttcttggtattgcttaaggcagagactcttcctcggagatagtctgtattcagaataggcatattgaagccccaaactaagtccaattcagtatctccaaggatatctcagggcatttttattaaaaaaaaaaaaaatatgatccacgaaagcctctgaatcagaccctatttaagaaccactggtataaaaagttaaatgaaagttgtgcaccgattaagtcatttgtttgtttactgttatacaaaggtgcaaaccaatgcttccagtaatatggaaatactttattttatatttctttgtgggtgacttcatagaaaggcactttattcacacaatacttattgatgggggtattcctactgcttcttttgaatttacttctccttatcagagaatttccaaacatctccattttaccaataattgcccttttatagaaatgtaatatgacttctggtagaaatattattattagtcctgctgagatagcaaaatttatccctggatgacctccagtcaatcccttaccaaagatctcaactgctgaagaaaatggggctgtctctaagtggccatcactgttcattaaggtccttgccattgtgttcttatctttcctgagtaatgggaagctttagtctggaagttgctaatcttgctaacactaaaaggctttctcccattagcagcttctgtgttgcattaataatcagaaagtaataaagagaccgacctcagctgttcggtctcccctgagatgaggccccagcttccctcttatccccatggtccactctaatggtcttgcctatattaaagtaatagagtgaataataagataagtgctgtctattttatcagagtctaaaattccttcttctttttggggaggacacctttttttttttttaagacatccaaattgaaaactataccatcaatacttttgcaattgaaattgacctgtttaattcatattgttttaaaaatgtaagcgttgactatcaagcacaggaaaaaaatgttttagaaaaaataaatccctccacctttcttggaagagttataaaacagataactctcctagggatgtcttcttgtccttttttgagtaaatcaaattactcatctgaacagcagtaaactaaagaaaactaaagatctttgattttataagtatgaaaaacttgtcaataaacaaaaaagaaatgaagagaaaataacatattaaaactaaataagtaagattggatttgacaggttcaaggtgcatgttaataagttgtctttgttgtttaaaatgttcataaagacaggaactaatgctgggattaattgcttatgttctttttctgttgaaaatgttcttttgcagaagtgcacttcttaaaggttcccttgatttaaacatctgtttttaaatgtatatgatctgtgtatggaattatattatctatgcggtagttagttgattgtaatttttcattttaaaataaaactactttttctttcaactatatatttttaactgggaaaacaggtaattcaccttgaaagtgttgctcattccttgtactcaaatactagaaattttttctcaatttacactgttgtatcctgattttgaaagactaactttataattaggtgatatattgcctatttttgcacttgtaatttagaggaaaaaaggaccaatatcaatcatcattatcagtgactaaacagtgactcaatgtatttttttaaaataaaatatatgttcataaccctctaacaatgaatcactgtgattagctctatgcaatacttatgtaagattcagtaaatgacagtaaaaaacaactaaaaactattttctaaaaacttataatcaacatactttttcttataagtacttaacagtttgaggggaaaaatgggggcattatctaataaatcagggatgctcatctaaatttttaaaaattatacatgaaaactttctttgaacgaaaaagtccataatctggaaataagaaaatgctaaatatgtttcagtaaaatagacagtagatctctccctcagagaggtgaaaatttaactcccttttaactaaataactctttcatatggtctattaggcaaataattttgatgaatccaataaactcacatgctttttgttttatttagcatgcaaaatgcaaacgtgttcaccacataccaatgggaaacatattattgttagagttgtctttaaattggaggaaaaaaaagagttgcttttgacattcttatgaagcttcaatagcagacaggtccattgggaaagtagcagctttaattaaagaattgtcctggagttgtagatataatgcacaattacctgaattccttttactgtttttctgtcctacagtccatgaaggctctggagaaactagtcaaaaggagacatccacctgtgatatttgccagtttggtgcagaatgtgacgaagatgccgaggatgtctggtaatatgctgtttttattcttttagacaaaataatgacagtgattaatttctttttaacaccatcaaccattctgcaacagaagacattgtctgcatttttattttcttattcagttcccaagtgaaaaaaaaaatgagggcaaggaatttctggaactggattaagaggtgggccagccaagcagctatccatggcattacttgataaggcacactaaaatatcattgaagccccccaaaactgtcaatgttaggatatagagggaaaaaaaagtcttatttactagaatatctttgaaaaagtatcatcagagccaggtgtgatggctcaggcctgtactcccagcaggcctgtactcccagcactttgggaggccaaggcaggaggatcgcttgaggccagatgtttgagatcagcctgggcacaaagtgagacccacatctccataaaaaaaaataataataattagctgggtatggtcacactagcctgtagtcccaggtactcaggaggctgaggagggaggaacacttgagcacaggaggttaaggctacagtgatctgtgatcatgccattgcattccagcctgggccacagagtgagactttatctcaagatttttaaaaggcatcatcaggcagcaatagatgatcagacttagtctgtttgggtttctataacaaaataccataaactgggtagcttataaacaaaagaaatttattcctcaccattatgaaggctgagaagtccaagatcaaggcagatttagtgtctgataagagctcactttctcttaaaatagccttcttcttactgaagcttcacatggcaaaaagggcaagggaggtctgtggagcctgttttataagggcactaatcccattcatgaaggcttcacccccataacctaatcgcctcccaaaggtcctacctcccaatactatcatcttgggggttaggatttcaccatatgaatctggggagggggacagcaacattcagatcataccagttgctaatctgacttctaagatgatggagtaactactcttttaaagatatgttcatcagataatgaataatacttattattttgaatgggtgccaacattttagctttctactgtattcgtcccaccttaagcacattgaaaagtgaataactcaaacttctgagggagttctttgtgtcatgataatgaaaagcagcagcctttttttattcctctcctattctctcttctgctcctcccctcctcctcttcctcttcttcctcttccacttcctcttcttctcctcctcctcctttccctccctgtctttccccttctcctcttcttttccttctcctttgtcttcatcttcttcctattattattattgctattatttctctctttttcttttttacatatacctcacccctttcaggaaaacatctggctgctctttattttctgcagtatgtagactgtgcttgcctagagcagttaaccatcattttgatcaaacttttgtgagtagaggggaaaattcatctaaggaaaatgaagaaaaaaaattaagacaagattatgtggcagtagtaaaacagtctgcacttaaaatattttttaagtgaagattctatctgagcaaatggtggttcttagggtaaactacgtacttacaagtaaacactgcctttgaatagccaagtgaaataaacatctattactaaaatcagacagcagtagagttttcatgcctgtcaaacacttctagccaatgggcagctaggagccgagtgagagagtctatgcactggtttgaccatcttgaggtaaacaaatgtatgttttctgttttttattgagacagagtctcgcttctttttttttttttttttttttttttgagatggagtctcactctgtcgcccaggctagagtgcagtggcacgatctcaactcactgcaacctccgcctcccgggttcaagagattcttctgtctcagcctcctgagtagctgggattacaggtgcgcaccaccatgcccggctaatttttgtatttttagtagagatggggtttcatcatattggccaggctggtctcaaactcctcacctcaggtgatttgcccgcctcggcctcccaaagtgctggaattacaggtgtgagctaccacgcccagccaacaaatgtatggtttttaaaaaacatcctagggaccttaatggctgatgaatttgtggttcccaaaactgagagattgccagaagtactttgagaatttttttaaacataccagttatttagttctgccccaaaattaatgaatcagaatttcagagaagtgggactcaaaattttacttttctacaagacccccaggggattatggaaatactactctaaaataaatgactaattcaaagactctttctccttcctaaatgctttagggctcttctgtagtcataagatcaagacacacaaataggaaatgtatccttaaaatatttcgtttctaacgtttattggtgactgcatctgtatttcagcatcattttttcaagctgttttcttgtaaattgtttcactttttaaaaaatgtacatgagtctcttttttttaagaattttaattttcctagttccttatctttttaatgattattctttaagtggtatagctccattctccaagacatttaagacatgagcttttaagagcagctgaaaattattggttgtttactatgggttttatccatttgtatactgtttttttttctcagctatcttcaaaatagccataggaggtagattccattattattttactctaaaaagagaaaactgagttttaaagtgttaaagtggcaggaccaagatgaagatacgaggtgaaagtaactaaaggttgttagcataacaattcaaccaaagatgcaattgaaacaatatgtctttgctgtcatgtctagacaatgagatggccagattgcaggcagcatatttgcagtgactctccaaggcctgcaaggttagagctggtctaggtagatgtttgcagctggaagtgggaaaacatccaggcaagcagggggttaatcctggtattcttgcaaaagttcagatccatggtatgaaggcagtatgaaaagatatgggcaaggatagtggcaccagaaaggcttagcaattgtctacagggcccagccatggcaactgtacttcagaaaataaattcagttacaaatgagacaaggagaaggacaaaggagaaccttagtcatggagaaattggtgtcaatcagaaaaactcgtcaagaactgaaacaggaaagcctggatagatattgcaactggtatacaaagccaagccttggttacaagttgctgggagaagcatagcctacatctgagaaataaattacaagatcagaatgaaaccagcagcaaagctgagtgctaaatcagttagctcttggctatgatatcttgtatgcccccagcatagggacaagattagctccaagatgcagaataagcctgaacctccagatgggggctaagtggccacggctgtgaagattagagggctgtaggggcagggagccaagaagatcattagacttccaagacaagaacaaaagttattagtgtttaaataaaatgtatttaaaatgttgaatgtaagcaataaggaattgtgctgaaatgacaagtgcattgattttcatttacataccttgtatgttaacgtacctttgtatgttaacatattgtatttagtcatggccatgaagggcagattggaaacagctgaaggacacaggaataaagcaatgagtgaaattaaataggcatagaatgaaagaggctgtaaagtaagataggaagcaatagcggagtgatctgactatagtactaggcaacagaaccttcactaaatcaagggagcgttgatacgctattgattttggatgacaccacggccaggttctctcaaacataaaatactacatatgataagtggcaacaaagagtacaacttattgttttattttgcctttaacactaactaaactataattttatgtgtacagatttcctcaatcctgcattatgaaataataacaagatgtgaataactgctgacgtgaaataatgttcttactatatccacaatactgaaactaaggtgaaaaattaattcctgatctttctttaaccctggcctaataagttaatattttgcattttcccactgggttaaatctagttattcaaacattcttaagtactttcaagatgaagataaatctttattagaataaaaaagtcagtacacagttagctgatcatgttttcatagttagatgagtttttgagttcagaagaaagtcacactggagatgggaataaaaaaattaataaataggggaaagagaaggagaataaaagaagaagagaaaaaataataattagatggcattgacaaactatgatactaatgacataacattttaatgcttttattttgagaaaacagatggcttgtaatctaatctaagaccgtagtttatgttctatgatttcatttcaaggtttttctcttgcattttccttacatggagaacatcaaggctgtaaaaaatcagaaaattttaggttctctcaataggaaaggaagaccattgctacaaaatactttttcagttatagatattaacttaaatgtaggaaaggattaagcttccaaaagagggttaaaattcaacaggacaagttattcacacgccagtacatccattctcataatagaggtatctttcattaaggatggacttcgaaagtaactgaaacacctgtgtgaagggatgtgtgtgcctgtttatggggaaggggttaagagaagaagaaagggattaaaatatcatttctctttatatccagactgaaaacagtcaaaactaatacatttatacataaaagagattctcaaatacaccctgccaaatataatttataaagaagaagaatggcttataaataagtcaaatataataaaattgactcattgcaaagtaataaagctccatctgatagcattgggaataccaacttatgatttcagcaaatatttctgatttcactttagaaacagccttatattcccttaattatcttacctgataaattatctcagtaagtccaaagtaggtcagtggaaactcttttctctgggaactattccttagaagtaattagcctggaactttctgttggttctgtcagtcagaagtagttcagagcccgggggttgatacttgatttaatatacatatacatacaaaagcactgatagctgggtctgaccataggaatggctgggtatgaaattggctgcatgcctaatatttccaggaacagagcacaggtgcacaggtttaagagcagatgcagccagatgacaaatgacataaagggacaacttaaattattaggtatatttgctttatatgtattcttcatagctctttatccctgttttaactttgcttttgtagtattctctacatgccactcaggctccattagcgatatcatattggcataaatgctattaactccttagtagtcattttgtctttgaaagcattaataatattttccagttttagtgtataacatccttagtgattgagtgcaatggtaagaaaggaaagaagcaaagttgttgcaaaaaaatgagttccaaagaggaatgaatgaatgtttattattttctctatttcattgatgtttcataactgaaacagggtgtgggatctggcatttcttttctgggtgtctcttacaaagacagtttagtttgaagtctttaacatcttgctcctttgatctgagaaagctccctgtcattaggaagattgtgtgttattggcaacctgcccacatttaatgcattttggattgtggaggctcatgaatatttgaagtggggcaatggccatggatgatccttggcactagatttcatcataggtataagtaaattagacattaggtcttgctgactttagtacctttggtttgtgagtttgatagggaaaattaagacacctctgaggaaaatacagaaagtggttttatttaaaaccactcctggttgacaattgaacaaaaagattgtatttaaaatggaaactgcaatctttgtattgtttttctactaagtaaaaaggtcagacttggatatggtacatttaaagaggatgctgattagtcacaaaattttagccatctaagagttcattcagtttctccctagggtgtttcccttttattaatttcctttgctttctggccccagaagtgtaactggtaaccaattttaggtgtggtttctaatataagtttactcatggagacaatgaaaaaaaaaaaaaacccagaaaaaagataatagatctgctctagaaaatccaaggttttttttgaatgtgtgcatggctttttgagaaaacattttagtttcaagattcctggagttgaggtatgacctccctccatttacctcttatctccaccttgaagacagtagctgtcacctctgaaagctgcagtagcgttttctgtttgtgtcaatgagtgggaactgaagagtagatacctctcattcctttaatgattccatttgcccaaaaaatgtttcggggtggggagtgcatatacagctcctgacttagggaagcacatatctttccactcagaatttcaaggggaaaatgttgatagtttttagcaaaggtgtgtccaaatctgaaagttggggtttgctttcattatttctttcttttctgtatttcttcacctatcttgatcaagaaaataaacagcttatatttttctaaatttcacacgatgtaataaaatttagaagtaaaagactaggaattctgacatggtctgtacgatggtctatacagggcattaaacaatgcccagggtcaacaaatgccatatttgcaatccaaacttctctctgcagtagctgccggtaatccaacctgcaaactgaagttaaaagcttcaaatgttactcaggaagacaaatgaataacaatgacacttctaatatgcaatagtcaaataataacaaccaccaacaacaactaaccacccctccagaaaaaggagggttatgaaagtaaaaaataaaaaaaattgaaaaataaaaataaacaatagtctttaaaaccttgagtcttctgtgatgctagcctaccttttttatttaaaaaaatgggttttcacataaattctagagaatcttttaaattcttctctgtatccatacctcaactgtactagctatcacagtgattaatgaaacttaattaggttatgacagctacaaacccagatctggtgtagaataccaagaaatatggggataaagaattctgaacttcaatgtgttttatttgtttttacaatatttattaggccatgcagtttaaatcatgtaatttctattttatatcaaaatcataaaatactgcatggcaacagaacaaaggaaacaaaactcctaagtacagattgtatttctaccactaacttaacagttttcattacttgtttctctttttacttgctttttttgtttgtttgtttgagatggagtctcaccctgtggcccaggctggagtgcagtggcgctatctcagctcactgcaagctccgccttccaggttcacaccattcccctgcctcagcctcccgggtagctgggactacaggcggtcgccaccacgcccggctaattttttgtatttttagtagagatggggtttcatcgtgttagccaggatggtctcaatctcctgaccttgtgatcctcccgcctcaacctcccaaagtgctgggattacaggtataagccatcgcacctggcctttacttgctttttaaatctttgcttgcttttgaaatcttgttgcaggccacaccctgttaatggtaggttgcctaacttttggtgctcactcattaaactcactctctatttcttcttgagttttcatgtctcagtttctagcatattctgagtcagcgattcctgtctccacactcagggaatacctgctccatgttccgatgtcccagtgtaacatcccagtctcaaagataataataggaatctcattgtagttatcaaagtgtgacaaacctttccaaagcgtgtcagacaccatcctaaatgtctagatttatagagccatttaatcctcaccacagtcttatgaatgtaatacaccagtaattctcatgttacaaaacagaaaactgaggcacagacaggttaatcaaacttcccaaacccaaacagcaagtgagagagccacaatttgtgccagccaggcagactccatgctcttaactaccactcagggtcttctcttataaattatgtgtgtatctaagtgtatattgtgagtatgcacacacacacacacacacacacacacatagaccaaatgtatctatcttatatattcaggatagaattttacatgttttaatgggaaaacaaagactttaagtggcagtttgggatgaaattcaccactaacacacctacattgtgtatgatgcccttgaagttctttttcactcagtatataaaatatatttctttgtagtccccttcaagactgtgtagttttcatttgtttgtttttcacagaggtattgaattattcttatcatggttatgcatgcatccaatcagatgagaatgttactagacttaaggttgcatagaagagacataccttcaccaaaacctgaggtttttttagctgcttcaattcaatttgcctgttttgcagtggcagtggcaaccctgactgtgagccaaagcttattacaaatgtctatttctgctgtaagaatagaaattcctggagatgagaaatagaaaaagagggaagagtcaccaaattaaataaaaataaatatgacagtggattttaatctgtatcttagtagattaaatgccctgctgtatcttttaatttagcacttaaaatatgatgtgaagcctcttatgttccaatataacatatatttttgatggttatattaaaatgggttttacattttttctaaatataaatacacacattccatcatagtgatttaaaaaaaaatagaaatacaaaaactttaggaaaatgtcatccctctctaagataaccattgtgaaatttggagatatattttctgtgtgtgtgtgtgtgtgtgtgtgtgtgtgtgtgtgtgtgtgttttatgagaatctaataatattttacatattaacaaaaccacttatcttgaaaatttttagttaatcttgagggtgagttatttggtgattgttaggaatgccaaaccaatttaagaataatgtatttatactggaatgcaatttctgtgtcccaagctctgattattctttctaaattttcagcacttctaaaaaaaaaaaattcgtttgagcgtactgtcctaacatttgtgatctaaaaaattatcaaagcctatatcccctctaagcctgtgttaaacatttttcttgtttaactccaagagattagacagtatgttaactgaaaacatttccactgtctgtatccagagtgttcataataaatagctttctgaggcataagcattgttagatgagaaactgtcctcccaaaggtgtattaaatcgggtagaaactgttgctggtcttctgtggtttacttccaaatagtaatatattgtatgtgttgactcatctaaactacaaatcagtgaaccatcctcagcagccaacatcagtctgttccagacacatttccctacaaacagggcatataatatctaataaatgattgaacaaattgtaaaattatatgcaacacccaatcaaaacatcaatactgctgaaagtctaaatgcttattacagaaaaaagccaataaataatgaaaacgaatatctgattttctagcccccctaatgtaaagtaaaattaatcaagagtgggtccattcatccttttatcactaagctatgaatggaacataagaaatcaggacaatgcatttgggacagatgatcttctgaagattgtttaccacagctctcttttatttattgcagcctttcaaagtctttgacacagtagttcactgtattctctgagctcatcctgaaatgagctttctacaatcaaaattatattatccatggtaataaaagtaatggtaggttctaacaagccataagggcttataataagcagatattaggagatgtttatctgggagaagtgcacaacagtttggaaaaaggcaaaaataagaaataaaataaaatattagcttcacattagcaaaaattagtgatgtatttctgtaataaacataggtatctgcaggccgggcacagtggctcatgcctgtaatccaagcactttgggaagctgaggcaggcagattgcccaagctcaggagtttgtgaccaacctgggcaacacggtgaaaccttgtctctactaaaatacaaaaaattagctaggcatggcagcatgtgcctgtagtcccagctacttgggaggctaaagcaggagaattgcctgaacctgggaggcagaggctgcagtgagccaagatcacgccactgcactccagcctgggtgacagagcaagactccatctaaaaaaataaaaattaaaaaaaaaaaacaggtaacacaggtatctgcataaatttggaacttaggatattcaaatataacatcaaattatcaataatgatgaaaaataaaaatgatatatttgattacagtatgcaacttaactttcaattaaaattgtcttccccagaaagtatgttgatttttggaaaaagaaaacacaacagaactgcttgcattacagctacactgggtggtcagacttggggggaagaaagaaaagaaaaagaagccctgcactgatcaatatattggtatattaatcagggttattcagagaaacaaaggaataggaagcaaaaaattttctagtgaatcactagagataatagtggaaggtgacagttccatttccaccccttgatttctggaccaatgaattttggctatgggagacagagcaccacatattaaatgctgattcagagcacatacagccttctggagaaccttgcaccagtcctagaaagcagtgtcacctacctggtgttacaactgtgatttctttctcttttttcttttttcttttttttctttgagacagtgtctcgctccgtcacccaggctgaagtgcagtggcatgatcttgattcactgcaacctccacctcctgggttcaagcaattctcctgtctcagcctcccaagtagctgggactacaggtgcatgccacatgcccagctaatttttgtatttttagtagagacagggtttcaccatattagtcaggttggtctcgaactcctgacctcaggtgatccacccacctcagcctcccaaagtgctggaattacaactgtgatttcaaaaaaccattccaccactctatcaagccagcagctataggatggcaggaaacatggtaagaccagggaattccatgagcatatacccattgccatgcttctttggcagtgaagtaagttccttagtcagaagcaatgctgtgtggaataccaagatggtggataaagcattccgtaagtccatggatggtagttttgggagaagcattgtgtgcaggaagaaaaatgtatatccagtgtaaatatctatttcagtgaggacaaacggctgtctcttccatgatggaagcagtccaatataatcaacctgccacccaggagctggctggccaccatgaggattggtgccatattagggactcggtgttggtttctgcttctagcagattaagaactcagtggtggctgtagccaggttggtcttggtgagtaggagtctatgttgctgagcctatgcataaccccccttttttgccacaatggccactttgttcatgagcccattgggcaatgaacagggttggctggagaaagaagctgagtggtagctacagaatgggctattctatccactttattattacagtcttcctctgctgaggttatccttttgtaaatatttacatgggacacaaatatcttcatggttttttgcccattgagagagatctatccacatacttcttccccaaatttccttctcaccaatattccagtcatgttcctttcaagtccttgaccatctaccaaaccattggccacagtccatgaatcagtgtacagtcacatgtcctgccttttctcccaagcaaagtgaacaatcaggtgcactgcttgaagttctgcctactggaaggatttttcttcaccattgtccttgaggaatgtttcagagaaggtctgcagttctgcagctgcccactttcaggtggtagctgtatatcatgcagaatcttctgtaaatcaggcctgagtcttttttcctctatcaactgatcacaaggagctcccctgtgaggccacagaagcaggcgggagagagaaggtcctgtaataggagtgggtgccatgacaattaggccccttcttttcatgtaacttacttgtgccaagagcctgatttgacctaatctcatacaaagtacttccatttgatgatggagtgctgctgtgcatgcccaacttcatggctttgcgagtaagacaacactcagttcatggtgggaagctcaggtcaaatagtaacttagtagtgcatagttaagtattaagtctctactaaggcccagtagcaaactaagaactgtttctcaaaaggagagtagttatccacagaagatatcagggctttgttccaaaatcctaaggatccgcactgtgattcaccaatagggggcccatcaaaggctccagacagcatccctgtctaccactgacacttcaagcaccattggatctaccggatcataaggcccaagtgacagagcagcttgcacagcagcctagacttgttgcagagtctcttcttgttctgggcctcactgaaaactagtgaaaagcagtttactcagtaaatggactagagtaacacactcaaataaggagtatgttgcctccagaatccaaagaggcccactaggcattgttcctcttttatggttgaaggtgaggcaaatacatcaacttatcctttaccttagaagtaatatctcacatgctccacatactgacccctagaaatttcactgaattttcttgaaaattcattctctgacatgcaaatgtcttaccaataactatagagtagttgctacttcttgctcactacgtcaaatcagcatcatgtcaccagtgtaatagactagtgtgatatcttttggaagggaaaggtgataaagattcctgcaaactaaattatgacatagtggtagagaattaacatacccctgatgcagcacagtgaagctatattgctgaccttactagctaaaagcaaactgattctggttgttcttattgagaggtaaggagaaaaaggcatttgctagatcaatagctgcatactaggtaccaggggatgtattaacttgctcgagcaatgaaaccacatccagtacagcagctgcaattggagtcatcacctagttaagcttataataatccactgtcattctccaagattcatctgactcccgcacaggcaagttgagtgagaacataagaatcaccccgtccccgagtctttcaagtccttgatggtgcagtctttccaggaatgtagtgtttctttgtgtttaatatttttcaaggtaaatgcagttttagcagcttccacttatcttttcctaccatcgtagccttcattccacatgtcatggaaccaatgcggggtttccgccagctgctgagaatgtctactccaattatacattccagatctgaggaaagaaacacagtgtaggttcagggacccactggatccactgtgagatggaactgagctaaagcttcactgatcacctgacctccataagcctgtactctgactgtggaccacagtgatgttttgggtcttttgtaattagtgtcagttcagagctagtgtccattagtccgtgaaaggtctgattcccaatgcacagttattctggcaaacagctgaaggtccttttgaggaaggctcagagaaagattaacagtatacatttttggcactgtaccagggccctttctcaaggggacctgacctcccctttatgcaaagggttctgtgtccataaactggctctagtctgagacttgattaagggaccatgactctctttttttatgatgtaggctagacttttgtttaagaacgtttctgcttatcaaatcaagtaagatttagtaggctttccatctattttttcacttttaggaacaccatgatcctaaaacactagcaaggaacactagccaataccataggtctccatgaatctggctattctgattgctgcttttgaccttgcttttggcagtcgagtactgccacttggcccctgctgccctgagacccaattactccaattgcatttagatttcccaagtcagtaactgctattcccatttaagttctggcctgcagagaagagtggtcctagagctcttcaaggatgttgtggctctcctcacaatctgtttctaacaatatgggtagaaggtacatcttctggacccttttggtgtgtgtgagtaggtcttaaatgacaaattgactctagcattccagtctctctaagcctttgaacctctttctctgtgttaaactgaggcatgcctagcatttctaattcgctcactgtggaccaccttttgctccatgtttcagtcaaccaagcaaccaaactgccagagctctttcaaattccccaagttgcaatattaaatgcaatattaaatatctgccaagtgagctcatatcaataaattcagcctgattcataacttcatattcttttcaccattatcccataccctagtgtccattcctacacatgtttttgggatttttgtataagttaggaacttaggtagttcttttggagtgtagcacacctcttcacggatttcacttcctatcacacttttaggtgcccgctggaacttgagttcagtacaggcatacctcattttagtgtgctttgctttactgcacttcaaagataatgtatttttcataaattaaaagtgtgtgacaacaccacgtgaagcaagcctaccagcacattttttccaacagcatgtactcaattcatgtctctatgtcatattttggcaattctcacaatatttcaaactttctcaaatatttctgttatgaagatctgtgatcagtgattttttttttttgagacagagtctcactctactgcccaggctggagttcagtggtgtgatctcggctcactgcaacctccgcctcctgagtttaagtgattatcctgcctcagcctcccaagtagctgggattacaggtgcctgccactacgcccagttaatttttgtatttttagtagagacaggttttcaccatgttggtcaggcttgtcttgaagtcctgacctcaggtgatccacctcccccagcccatgggattacaggcatgagccaccgcacctggccgatcagtgatctttaatgttactactgtaattgttttggggcacccaaaccaaacccatataaaacaagtaaacttaactgataaaacgttatatgttttactgacccgctgatcccccatctctctccttttctacggcttccctagcatgaaaagtatttccactgtatgaatataccatatttgggttatttgttcatcagttgaggaacatttgggttgtttctactttttgactactatgaataatgctgttatgaacatttatgtacgagattgtgtgggaatgtatgttttcaggtctcgggtatatacataggagtggaattgctaggtcatatggtaactttatggttaactttttgaggaagggccagactattttccaaagtacctgcaacacttatattccaccagcagcgtatgagtgtccacacttcttcacatccttgccaatgcttgtaattatctgtctttttgattattactatcctagttggtatgaagtggtatctgattgtggttttgattcacatttcacaggtctaatggtgttggtctctttttatttgtatattgaacatttgtttatctttttagaagaaatatccattcagatcatttgtctattcttaaattcagcgatttgtctatttgttattgagctgtaagagttttaaaaatatatataatctaaatataagttccctggcagatatatggtttgcaggtagtttctctattttgtggaattgcctttcactctcttgaccgtatcctttgaaacacaaactttttaattttgatgaactccaatttactttgttgttgcttgtgtttgttgttatatctaagaaggttttgctcaacccaagggagcaaatatttattccaatattttcttctaagggatttatagttttagctctatatttaggtctgtgatccattttgtggtattttttgcagatggagtgaggaaggggtccaaattcatttgttacatgtagatatccagttgtttctacaccatttgttgaaaagactagtctttcatcatcaaattttttggacacccttattgaaatcaattgaccctgtatacaaagatttatttctctagtctcattctattccggtgatctatgtatctattcttatgctataactggacttcattttctcatatgtaaaattcaggaaatgagggtgttgctctataaggtttctatggtttctttgggctctaacatcatctatcatagcagaagaactactgtgagctctaaagaactacccccaaagcgtccccagtggtcctagtggcatttttttctctttctttttggcctaaaatttccagagtgacttttaaatttgagaagataatctatcatgtccagaaggcaagacttcccccctttatattttaatcccttatacattaacagaaaccaagtttttcatattagctagtcacctctttagaaagcacagaaaataggaagctcttcaaaggatttgaagcagctatgacaaaaggtaaacatataatgaagatacttaaataagagagaaaattcgagttgaataaaaagacaatgttgaggagaaggaagaatgtaaaaggcaggatagaaataatagatttaaaggaaaaccaaggctaagagaagctgctactattaatcaaaaggcttatctctgagtgctctgaattcaaggtgagaaagaaaagaaataactcttatggtgtagttagaaaagacaactagttcatcaagaaatacttttaccagttctgaattctacaaaaatgtatactgtgtacatttaatatgattttgaataaaataaatgacactatctttgattactagcttataaattacataaaattatttatattggaacttaatataatttattactgataaacttgtaaaattgtaggtgattctttgttaaaacttgaatactggtatccaggcatatcattgttatagttatatgagccagtacaggagtaaaacatgaggaatacatggccactgtattccttagtctcctttcaattatcaataatctcagccagagattaggaagcatctctaaaatatctaatgtgaatctttaaaattataattcacattcacagacagcaaaactaagtagttattgagcaataaatcacttgttcatatggcagaataagaatgaatgcctggtgtcctgagatggtcctaggatagtgtttcctgaaccattctccgatttattcaaaactactttatgaacagttgggaaattagatgacttggtttgtggcaatgaagtaccatttcccaacatagtttatttttctgtaaatattttattttactactaagaataaaagaaattgctgttatataagttgcacagattggaaaacattggtctgatcaaagttttatgataaatatccttgctttaattgtaattaattgattaaaaacacaaatgagaagcaaagagaaaaatgtacaaagcaatagcaacatatccaattttgggcctagcaattataattatgggtttagaacatccaatctgactttgagataaatttacttataagacttcctactaccaattctgttctttctttttttattcatagaattgataaataaccaataattttctagttatatttgcctttttttcctataaatcctcacaataggacttgtagtccttcattagtataatcaggctgctgaaaactttaacccagttattcgtctattgcctgtcttttcctcaatttttgtttgccctaaaccaagacaccatttcaaattaaagtcttctactataatgttaagttagatggggggggcgggaaatatctttgcattaaggaccaaaaaccacatggcaataaagtagagtgcatgagggccataggcttgcatttttttaaatgtaatttagttaaattctatttttgctgcctataacattggctagaagggttgatatagaacagtgtggatattaaaaactgtagcttgcaaagttacttgtcaggaaggctttctttttaaaaggaaaacaatacaatgggtacaacaagtatcttaagtatagaaagaggaggctgggcagggtgtctcacgagtctgtaatcccagtatcttgggaggccgaggcaggtagattgctcagtccaggagttctagaccagcctgggctacatggtgaaaccctgtatctacaaaaacacctagccaggcatggtggtggacatctgtagtcccagctactctggaagctgaggtgggaggatcacttgagctggggaaggcagaggctgcagtgagctaagaacagagtgagaccccacctcaaaaaaataaataaaaaaagaaagaaaagagcagtgtcagtaggagttgggatggttaggtttgaaaggtttaaaaaaaaaatttaaaataacaactaagtattattgttgtagtgcttactttgtgcactacactcttctaaggactttgcattccttaactcattgaaccttcaaaagagcagtacaagttatgtactattagtattccagttttaaagatgatgaacttgaggtacaaaggtgttaaataacttgtctaagtttacttagctcttaaaggtcaaagccaaaatttgaacccagaggtcgtactcttacctgttctgtcaacattctttccaaatgtgctctagaaaacctggggcatagtgaagaacttgtaagactcaaaggacttttacatgtgtaaagaagggaaagaagtttcttgaagaaacagaaagaaatgtattaatgaacatatatgaagtcatgtgcaccatcttatttaatctttcacaacagaatggttagtcgtgactttcctccatctgtacaaagaaggaaagcaaggttcagagaggtgggtaacatgccgaatatatgttggtaggttgaggtggatcttgagttcaatctcaaatttaattccaaggtccatgtccttttcactgcagaatgctataggatagaagtcaaggtagaattaagacagaaaaactgtcctttcaaaagaaagaacagtttatggttgagaatgtgtatagtacttgaagagttagaaaagtgcatgtagccaaatgatggaagattttgttgccatgtatgatagggtaagcaatatcaaatgctataacagataagtgccaaattctcagaggtctctctctctctctctctctctttctctctctttctctcctctctctctttctctctcacacacgcacaaacacacacacacacacacacttgttactctcatcataggtcagagaagatggtgccaatcaggcagcctaatacaaggtcctgcaggggccaagggtctttccatatcgtggacctgcctttccttctaaggcagaaggacctgccttagaaattccttctatttctaaggaaatagaacctcactgaggttctattcattaatttaatagaaagaaaaaaaacttaagtgagaggtttttttttctgttttctgtttttctttctttctttctttctttctttctttctttctttctttctttctttctttattttggctagtcttagaagtgcattctgcacttctagcaacatcccactggccagaacatttgctatatagtaaaagtggcattaaagagaaagaacccagtaatgaggcttggtaatggtccccaaaagagagattagagtcaggaaagctttacagtatgaggagatatttatttagtacatacgataggtcatgctctgtctgagccctgggaatacagcatgtaacacagataaggtccttgcctttaaacagcttacatcctgagaaggggtgagatggaatagacaataaagaaatgaacaaacaagcaagcagacaacatcctttcagataacaagtgttttaaaaagaaaacagagttctgaaaaacaggatcctgggagaaagggatgctacttaagattggatatttaaggagtacctctctgaggattgacattttagtcaaatagcgagagccagctatgcaaagatctgttgaaacagtattctgagcaaagaaaacctctggtccaaaggcgcaagactggggattagcctggtgtgctgaaggaactgacagaggtcagtgtgtcaggagcccctaaaataagaaagaaggtcaaagttgaaaaggggtttgatcatgaaggtgctagtaggccttcatgaggaggctcaattttattctaagtatactgagaatcctccagatgttttattctggagatgtttattccagatatttattcaggagttatatgattcaatcatcactctcacttcctcctgaagccttgcacgaccattccagaatatcatcatcatccccttctctttccatatcatgggcctgcctttccttaaatcactgaggttctattcattagttaaatagaaacaaaaagaaaaacatatcttacatgagagttttattggctagtctttgaagtgcattctgctcttccagcagaatatccagttggtcagatatcccatagcaatttcccttgcttcaatcacattggtacttctggaaatatggatatgcaatctccttaactggaatgtaacctcttgaagagcagacttatatttaatttgtggcttcctcagtaacaaacacagttccaagaaaacacttaggtcttgagtaactacatgaataaatgaatgatgaataaataaataaggaatgaaaaatagttgaaggaatagagagcagtatcctcttgtatttggagtctacaacgtgctttcacttttactgtgtcatttgatccacatgagcacatcgagttcatgggggagagtttggtaactgcacaattatgagatgccagagattagaagtcaaacagaaacgaagatgttaaggctgagcactgagaagaataatggaaccactttggaaataggggatcaggaggtaaagtcaatttggagtaggggagggaggtggtgagagaaagttatgttctgattcagctgataaaaggcagaaccaagtagaatgcccagtaggcaagtaattaaaggttaagttgtgtgatgcagacagaaagagctgcaggagttcagataaatctaataaagaaaatggatttgggactgaggaatgagaatagacactgaagtcgcaaaaagttagactgctgggtgtaatgacagaaaatatttactgaaaataactggatattgggaaaaaggacagactaagtaatgggaaatagatatcaggatatattaattaagataagacatcagaaataaaccatagaagaaaaaactgaggagctgccatcttccatttgtttaattaaaaaatgaaattactgccctactcacagtgctactcactgaatatttccaatttcctacctccaaaacagtggacataggactgtgttatgggatgctgcttcctggctactttgcagttgaggacactgatgtgtctggttctagactgtgacctgtggctgaatgtttgattgccaatacaaaactctgcaaactttcctctttctgacttcataattagcagtgttcaagtaggtgactgctttgtcatccaggatccctgggtgatatagagcataaacaaacaaacaaaaaaaagatcgttgtcattttaagccactgagatattgagggtgtttgttactgcaacataacattataccctgcctgatgctctcaacatcagtgcccagtaagaaaggatgaatgtggagtgaaattgaatcctgtgacaggaaacagtggggaaactaaggatcattaaaaaaggaagagacatcaagttggcaaatgatactgaccaatcttctaacacacttatccccgaaggccttgcaggaggatagaactggaaacttcacggcaggtgtgtttacctacccatccatgccccctccagtgaaaagcaggatagggcaactccttcaggatgatggaaaatgcctcagactggctggctgtgtcactgtccttgacttctcctcacaactagtatgacaggttgatgtggccgagcgtcagaaaatcgagagaacagttagcagtgcttccaggtctccagagccacaatgcctatgacaaaggataaaatgaaccagagacaatcataaccaaaattataaagtaggacaacaatttataaacaggagagagtaaaatgcttgattgggttctgacaagaagaatatatttagaaagataaaaccaagcttacaagaataaagcagaaattgattttccatataggacctaccaatgtagagattagtaaaaggaaaagaagacaaaaaaggtaaatccatttttgttcctacaacgtgcaacatattcgtgattttttttccccatggaggagtgatgggagagtggaagggaagggaatgaatatatttttcagctcaatctttgactacttctcataacctaactttaaattttaggatttgtacttaacactatattgagattgttattttaactggaattctaagatttgtgaactgtaaatgaaaaacatactcattaaattttattttttcttgatactcaaaatcatatttataaaaaaaggattttttttttttttttttttgaaatggagtcctgctctgtcacccaggctggagtgcagtggcacgatctcggctcactgcaagctccgcctcccgggttcacgccattctccttcctcagcctcctgagtagctgggactacaggcgcttgccaccacgcccggctaattttttgtatttttagtagagatggggtttcaccatgttagccaggatggtctcaatctcctgacctcgtgatctgcccacctaggcctcccagagtgctgggattacgggcgtgagccaccacgcctggccaaaaaaaggattttttaaaggagaaagaggtgcaaacctctttagttagtaaaaactaactagagaattctcactaacaaaaggccttgttaccaggatagatggtcaatttgtgactgagttgtagccaaatcataggtgtgggataatcacactatatcaaaatttaaatgtaaaaatnnnnnnnnnnnnnnnnnnnnatgaaccaagagctccagtcctcctggtcatatttaatagggaaaaatatgtttggatggattgatggatggagggccaaacagatggatgtatggagagacttatctaatgaggcagcttggtattttgagagagcacaggttttgtgtaaaaaaaaaaaaaaaaaaaaatccaaactggtttttttgtgctaaaagcagtctaattaagagctgagctgctaaaatcagtttgcttggcttaaattttggtgtgtccacttactgctgtgtggccttatgcaaatttcttaaccttcctgagtcaccaggttctcattcatataaagagaatttgaacatctattatatgaagttattaggaatatacgtaataactatcatcaatctcagttttctttgaattgcttatctaaagaagtttatctcaaaagtatctttgcctatgtcttaaacatttattatttatactgatttggaggaacgtatttgttctgtcattattgattacctgtatgatagtgtcttagttcatcacagaaattctttatctgactccaaagcagacacttaaataggccatgcatgttagcacttattctactgggggcttgaggtgagtgggtattaacacaatcaaaccaattgtttgggtttgtaaaaacaaaattagtgctttaatctatttttatactttgaatactagtgtaggtattaaataaagagcttaaaccaagaaaaaccataccatcctgaatcttaggaaagttactttgttgttgttagagaaaaaaacaacaggtttatttataatataaaattaacagcaattgttcacaaagacgactttgtttgctactcaaaaggaccctgtgagtgttcctatcctgattttgctgatgaggaaacggggagaaactgttaggaggtacattccttacactatgtcctatggctgataagtgaagggggccaagatctgaacataggcattctggctccagagcccaggcttctcactacctcattaaattgcctctcaaataatcataccgtgttaaatgggctggatgggaccttggagatcatataatcctgtctctttgtattaccgcttgtaactgtaaagcagagagaagttaaacgatctgcccaaggttatacacttccgtctctttcccaacataataacacactctcgttgaaactcatttctaggatttatacaaactaatggcaaagtcatgacattttttaattgaatgcccaataaaagaatcattttcatcttgttttaccatctcatgtccatgagtaaaatgttaaaaacgtgttgcaaagccaaaagggtccttatcttcatgaatagcctgcttttttatagaagaaggaaaaccatcactaggctgagtctgttttaaatgaaataagtatgtagtcattttcttggtgaagagaatctctggggcattaagggaaaagatggcacatctgaccttctaagtcatgtaacttcaacttagacaatatatgacttcaagaaaagtatcatctttcctatagttgctggtcttatatatcttatgagatccttcaggtcacttcactctggtttcaggtagaaaaccaatggggctaaaagtgctttgtgtttccaacagaccaatcaattttatttttaactgttaaagtatttgttgctgttcagtcaatcttttactcttgctttagtcagacattagagaggatgattataagtaagtatattatctgaatgatcttctgatttcaaagtcagggattattttccttgaatgtttaagtggtcatctctaccttttccaaagccagaaagcaagaaaggctgtgggtcatcttccttgaaaaactacataccacaactgaacacaatttaaaattgcagccattagattaaaatctctctcaagggttctacacaagggctcattttggtgttttatataaaggcccagctccctgaccaactttttgaccttagttgagttacctaatctctctgaacctcagcctctctacctgtaaagtgggagagacaacagtacttacccacaggatttttataagagttaaatcctaaaatgtatataaaatttttaagacatgacttgatgcttaataaatctcagatgttatctctgtgaattcagcattcaattacaatgcacttatctagttctgaggcttccgtttttatctttaggcatattatggacaaatatttttgccgctctgattctcacgctccaagtattcattcatttatataacacattcactgactgtctgctaagtgtcaggcattgtcccaggcactggagctacaaagtgagcaaaacagataaaaagttccattattgagcttaccttctattaggaaaacatgataaataagtaagcatatatgtagtttaatataaataaatgctcaggtaaaaaaatagtgtagaagtgacacaggacttattaggatatattggacaagagtgttaaggaagtaggtcatgaatattgcaatttcagataggatgaccaaggaaggctttcctaaggcagcaatattttagtaaaaatgtgaaggagatgaggaaacaaaccctatgactatcagatcatttctgtcccagatcacagcaaacatttatgtaagcaccaaccacatgcactctattttaggtatctgtttcttgactctgtatgtcccaatttaacccatcaactccccgccccgcccaacctgcagtatttctgttctattcttctaatcatgcaggcgaagaattaaccatgccattgctgatgcttgccttctgttcccctgtccgtgcatgccaatgtccatctactcagctgctaagtcctaaaaatttatctccacagttctttcacatttactgtattctttttgtttctgttgacaccagtgtagttcagacccatagtacctttaacttgactatcttaataatcacctcactgatgcctcaaaggccagcccacagtgatcagttcactctttgtagacatccatgggcttgtcagttcacaatttcagaatcttcaggaattccctgaatcaaaataacaataaaagaggttgggcaactctgtggcttgtcaacaacatgcgggctctgggtcagctcacagattcctttggccttctcatcattgaaacaggaaggctacagcaagcagaagcagcacaataaccaaaggcagaaatgagtaagcctctgtatcaatgaaagcttacactttgctatcaccaccaaccacagctgatttcttttcatcaccatggttgtgtcacatatgtgtgcttatagcaatcatgggaaagggaacaccaatcaacatgctttccctcaactcatgaccttctaatatctgaacagattcaaggattctttagcaaggaagaaagggagcagaaatggcttttggatgggcagcaaataatgtctgccaaatcctctactgaataaactattgactatgatatgcaagccttctgagaataaccttatttttccttcttcaacatggtttagtcagtatgtgctctggactctctcatctccatgccctagatcggtttgtctcaatgtgtggtccagcgactaagatattatttgccttttttattctcattcttacacaaatgcacagtggagttttccagaggctacttgatatgtgctcttcaacagattcaatgaagaagcaggtatagaatccagctttgttgtattaagccaaggattaaaggggttttcaaaaatgtacacagtgccattcttctcactgaatttatttttagaaagcatattcatttttttaaaaatgttatctatctcaacatgcaatgggtatgttattgtttctaaatccatcgataaatacaaattttaaatgcctcaattgcattttctaatatgataaatatcaatatgtatagaatgcataaataaaagctctttggggtcttccaataatttttaagattatgatggggttctgtgagaaagtggtttgggaaatgttgtcctggcctagattacgtagcatcttctacctgtgatgccacttcctccatcacgaaatgctcatcctaaaagatttaggtcagaggactcttcctcagtccttgggaggaagctgtcattccactgaatctcaatgtattccttttctattgctgcattacaaatcatcctacaatttagcagcttaaaacaacaatgtttatacctcagagtttatgtgggttgggaatctgggtgtggcttagctgtgcttctgacttagggttcctcctacaactgcaatcaagatgtcagccagggctgcagttctctcaaggctcagcagggggaagatccacttgcaagctcactcatgcgtctgctggcaatactcaggctcttggtggttgttggccaaggtgtcttgacaaaatggctgaaattccctcccttcccccaacccctaagaaagagatggtaggtagagaatggacgtggggggaggggggagaagaggtggatgccagagtattatttttataatctagtcttggaagcaacatagcatcattgtggcctgttatttgtggggcccaatgcaaaagaaatatatgaagtccctagttcaaaaagcaggaagaagttcccttaaagggttttttctttcttctgttggtgtctttttcttgacttcctatggtgatttttacttgctttgtcattctgagtagagaaaggttaaaattttaaataattagcataattttaccattcatttttatattgtactatgccaggtttagatgcaaatataagagcatctaatttttatatagaatcaccaaaattacacaatttgtatctcatagcttatacattcatgtgtatttcattcttacaagaatagtggaaacttacacaaaacgaatttaactgtttttattgcacatcatgatgctcacgcattctaccaactctgcctacctttgcttgctgataagaaatgactgaaaggaaaagaaaatacagtctgccctgtctttttccaccagtgtcataattttcagtataaatggttggctaatccagggaagtcaacttccacacatccagggaagtcacacacacacacacacacacaaaacagtatgatagcgttccttggtcattcgtatttctcaggacattattgccatctttctctgtgataaacaagctctggtttgaacaaaagaggcatcttgttggggcaatctgcttcctccttacttactcatagaagtaatgcacttgtattagtctgttttcacactgctgataaagacatacccaagactgggcaatttacaaaagaaagaggtttaatggacttacagtcccacatggctggggaagcctcacaatcatggcagaaggcaaggaggagcaagtcacctcttacatgcatggtagcaggcaaaaagagagcttgtgcagggaaacttccatttttaaaaccatcagatctcatgagactcattcactatcacaagaacagtgcaagaaagacccccccccccataattcaatcactcccactaggttcctcccacaggagaattacgggagttaaattcaagatgagatttgggtggggacacagccaaaccataacagcacttaccttgtacttgctttgagtctcacgagttcccatgactcatggggtcaccagaatcctgcgctcatgaggcactgagaaccatctatgtgaacaaggtggcaaggggaggaggcagacacacatattgaacacagctcatggagctcatgctctgatccattgtctcacttgacttcatttacaaaattcaaagctaaaatgattaagaatatcaagttgatgacaacagaacattaaaccaagttcaggactctgtgtgccctgtgtgcactggccacatgcctgtaaagccagccctgcccatcacttctcctgttttacaagaatagttactagttacagcccacactcaagggtagggcattacacaagggcatgaataccaggaggcaagacccttgaggaccattttagatgttgctgccacatccaacatcatctttctgttttgacttgttcttttctttcgtatactctctatatagttactcatgtacatattattttgtatactgttctatgtgataatctccttaaggatagcgctcctctctgatatatatcctgacatgcctttatcatatgtaatatacaacacaaagcaaggactgaatacatgcttttggaatgaatgaataagtgaattaatgatgcagtggaactttgatttaaattctggtaatcagtctttgtgaaaaattaccataatgagaagttgaccttaatattttcctcaaatattgcaagattaagactgtcgttattatttcagatccttatttttgcacaagccacatatactgatttctctttattcccccttgtcatgaactgtcccccctctaaacatggattttttctgacctcttaaaaaatcttatttaagttattgttaggggtgaattattgtacttgaaaagaaaattaatgatacaagggacagctggagaatatctggagaaactgttccattggcatttatatttttattttggactgcatcaaaatggcaggggagctacgcccttttaatggcttgcacatgtggtcaggcattgtgtgagcaaataatgcttcccagtgcttgtattcaattttcagaaaaagaaaataaaaatgaacagnnnnnnnnnnnnnnnnnnnnnnnnnnnnnnnnnnnnaagcattttcttcagttttcttcttcggtctatcccacaatgcataagctttcacttctagatctgtttcaagggtcttttataatgacagaagctaagtctttgtttccaagtagcagaatacagaatgcatcagtgtgccatttaagaaaaactgttttgtcagtcttgtttatgcactcaagataatacagtgttttaaaaaaaggctggactcaacctctgcctgtttattcaatataaacagaagcatcccttttgacgttgtaaggacaggatgtgtgctaatttcaacaagtaaaagccactgcacttggccacataaatccttgtctgaagcaaccttgctgcttcacaatattgtgaaagggcacataaaggatgataacgatgatgcgcatcaaatattaatgtgcattgacacacagtcgtctattacagcaggaaagtacccacagtgagctgctatagggttatgcctcccttcacctttgtctttacacttgagctttccctccacttcccatgcctaagtaaaacaaagcactctgtaccctaaggagcaactccaggaaggtctggcagccaagtgactggtggcctgtttagttaaaataaaacgcctattgggctaatgtgtgatcaagagaggattgacatttattgtttcaggtttatgatactgtgaactgagcaaaagtgaaagccacttgggggcttagggtggggaggggcgcacaggggcaggagttcacaagcaatgaattgtattttttttctttaccattttcttcccagcatgttagcaataaatgcattgtctttttatcatgttttatgtaagaatgtatgaataaccaagcaacaagtcaactccgcagtttagaaataaatgtgttggttaaatagttcagtcagggatgtatttttctctttgtattaagcggcaaaagcagctgtgctgtatctgtgccctgcattcagacattgtatctcccccttgtggatcaggccccctcgagctagcacccatcccatatcctgcttcattttagaatagtaccacacctaaataggaaggaagcaccaggaatctgtttatgcaattctaaatcttccaatttaaaaagacatatgccgaaaaatcaacatattgcttccagacagagttttttattattatggcacatctacagatctcttcccatagaaaatgcaagtactgaattttataccccacgataatatgctgaagcagaaattttgctttttgctacacagaaaacaatttctacactttataagtgatgcctaagtgagagttgcaccaacttcttagatttgaactgtgctgttttccatgtcttcttatgaagcaagtttgggtttttggtttttaacaagaacgctatatcattaaattaaaaaaaaaaaaaaacccttctgttagctgaatttttgcctcagataagaccttacccagcatcagcttaaccagtaacttcacacttggttgtaggctcatccttcatcatccccgatcaataattcaaaagctcaatagaaatgctttaaattgaaattgaacacaccattaacagtcctagaaaagtgggcatcattcaaacaaaacaaccataggcactctgtccatcaccaacacaatgcttgatatagcttgaagtctggattcctcactaactaccatgcatttccctcggatcattacttagtcctgagtgagtaaacttctgatcacctcccttcatcttggcattagtctatttcctttataataggcaacagtatacctcattcattccctctttgttcgggcctctctgcttttcgttaattttctcctggccaaccagccaactctggctccctgtggttataggaaattatccatgcaatgaacttaatttagaaaactctgctgcataaagaggtggcagaattattcttctcatagtccagtctatgttgactttcatgctacagcatttcaacagtcattgacatagaaatagatgcttaatttaaaatgtttttgcaaaagtcattggacgattgataaataaagccgaggctagactccaaataaagtgcttaaaaaagtaaaattctggcattcatcttccttatcccttaatggggaaaaactctcatgaaacaccaaccatatatgtactccgcgagtatatattttaaaacgtgtctccattattagaaaatgtgcctgctatgcacacttaaaataggtgaattctaactcaaattttaaaattttactgtagaataattgtttttaaattcattcaggaactaccagtgttctccacatgcctgacacagctctattctataccatgctaacataaggaagcatttcacttactttgataaattgtaaagcttctctctttctgcttatgaaagaacaagaatccatcatatttttaaaagcaaaacaaaaagaacaaaatactgaagggcactcctgaattttttacaatatacaattttatgctatatataaattgaaataatgtgttggcctaatacagcttgtgttgacttaatgcagcttatagtagaatgaagagtgggaagtatccataaaatataattctattttagtatttatgataaatcaactatggaaaaccctcatctatgggaaatacattcaaaattatcacatgaatagagaaatatgggaatattgtgccttagcaatcataaagatatgcataggagatttgtgactgtcacaaggaatatctgtgaatttgtcacacattcatccccaaactgtccccttggcagtgttctttcacagaattccagaagaaacactctatttagtgttaatctttctttagcatgccttttaatcactttgaagcttgtgattatctttactcaatgagagttgctaaaccttcatccaatgagtatagtctgcccccaagtcaggtgatctaaggataatagacatatcactaaaaaggagctatagaggtgatgagaggaaagctctcccagtttaattctgtgtctgactagcagacctaatgaaattttcccaactaataaatagaaacatagacagaagataaacaaacagacagagatatgaaaaagtcaaattagcataagtgcaaagccaataaaactggacttaaaaatttaatcaacaccctccatttctttgtctgcagaaacaaagagtgcccacccctacctccagcctattttgaagaacataaggacaaaccaatcaaaaactgtgcagcctttcctttatagattgatgttgcttttggagaaaaaaataatactgtcatcacctttctgtttcccatgagttgtcacctctctctcaaaactcaggcagaaattacagttcctagcgtataattaggcatgacatagaaataggaagtacctggtgttgatgtagttcccacaagaaaaaaatgctacaggcagaagaggtagagaatataggcagagtcatggatgttgaaaatatccatgattatagatttgtgtgtactcaatctattcatgtcttagagggcaaaggccagccattttagataaaagcctaggcactcggctttgaactaagaactttgtccatcaacctgccaacatagacaaataagggaatatggccagtgtgcaagaaaacagaaaatagcataaatcacaatccgtacaacttgcatattggcaaactaggtttaggtaaatcaggacttattcaaagatgaataagcaagtaaaaaaaaagataaaaaaatcttcaatgtcttttctatcttccatacttcataacaaaaggaaatcaaacataatacttagtgtgactgattgggagatacttacttcataagcttattgtaataagataaagaatgtaatttatctagaaagcacttagcacagctcctggcaagtagtaaacatccaataaagagtaagtattattattattgataaacaattgaaactaaagagatgactcaaaaactgctttcctgagtccaagtaaatccaaaaaacaaaaactcagtgcagattaaaagaaaaaatctcaggcaaaatcagtgaattagtgaatagatgcccactccaagatatatcataaaataagatttcaattataaagacagagaagaaaaactgacaaatatccaggtacaaagaaacactttgcttcctctatcagaagggttctaccaaagaaacaaagccactactaatgttacaaaattagggatgtttcatgagaataagcccctacacatttgtgagagctgctaaagtaataaagtagaacatggtagggggttgcctctgcatgttgagttggtcccaaagtcactatagactaacagggttattaatcaggaagaaaagttgaatgtgagtcaaggacaaaccagaacatgcaaggacaaactggaccacatatctctctctcctagccttcaacttcaatgatgaggatgacctgtagaagatgaaacctttactatgaagctgcacacccacctgggtttggactcagagaggcttatggaggagatctagtgggagcttgagatgctgcaggcctccctgctgccccacaccaacaacttgaggcagcaacagatcagcagtgatcagtgtgatcagcaggtgcacctggcaccctccatagatgtgcagagactaatgggtatagcttcacttccagacaattctcttatggccaacactaacccaaaaccgtgcacaagaggatttctgtgaaatgcagttgcaacttagatacctacaaaggaacaaaaatgagaatgacctcaggcttctcttctacaaatcttaattccaggcaacaatggaacaatggcaactgaattatgaaagaactaagctatgagctaaggacttagttcctgtatttgcttttttcgtatccgaagacatctatcctccttacttcagctcacacagattttcaaaattccttagatttcccacacctccatctgcccctgctccttttcagtttgaagttcttctccacagcccaatgttaccatgtactatgatgctcttgggggcagttctcaaattcacacttttgcttgcgtcttgtcacttagttatggcacatggagtcctgcatgttattctatcacactacctttctatctcttctttccactttggttctagccacgttattctttaaattgctctcaggtttactatggtctctgttctttcagtttggggcccacacataccacaaaatcagtacctaggaggaatggtagagtctgctttgaaagataattctcttgtgtctgtttcaccctttgtctttttctatatcttctcattttctatatcttctcatttttcttactttttcaaattttattctattccctttcttaatttctatacttatttaaagggagaaagtactctggaaccttcaataatcaaaattctattttctttctttgatgttctgcttcagcctagttcttctaagagccctgtgatcagttctcctaggaaagtgactggtaaaatcaaagaaaattgagtaagtaagtgtcctcaaccccagagtagtattggtgtgagaatttaaaaagaaagacaacacctgtgcttgcaaagatacagtctctctttaagatgtaagggaggactaggtattcttaaactttttaatatgcttttcaaactactctgaatgatcaatgcttaagaaaaactattaaatagataaagtgttgttgagtattacacatttgagaggtcactttaaaatggaacaaaagttcaaaagtaaaacaagaaatgtattttgcccttaaagtattagcatacaattcaatatgctgttgaaagcacagacacagagatggttgcaagtcaaatgaaggttatattataattgatactttgaattgttaaggagaagcaaaggtgaaatggaatgcttttactattatttttgttgaaatcttattaaaaacttttaatggaatgcaaactagagaccatcttcaaggtctcaagttaaattagatatgcagccattaatagtatcccttaccataacactttttgaaaataactttcccaacacagagatgggctaatccattttctaacttatttgtattttctttgctatttcagagaaattcatgagctcaaatgatataagatataatcatcatacttactcctgattctcaaatatagttgaaaatatctggattgcaatttatactaagtatatacatatatataaaatgagtaaatttagcattataattcagtggtttgcagtcatgtttaagtgcttgagcacctgaaaatcttgatatttggtgaaaatgttcatgaaataacgacattttaattgaactgaattagaaggaaattcacctgcagaaatatgactttttatatgtatgcaagtctctacacataaaaagtaatgattcataacatatatttgagaattaacatatgtaagatttgccttgcttcttacatattcttggttcattcattttgtcaaatttagcagcacatgccactaggcaaattgaagaaccaacaatactagggaaaagagggtagggaagaaaaacttacaattcagaacaatttcttttttagcttgttttcctcagagcctggaaaaaagctgttattattttattttagtggcagaacatcttggttgtgctcccaacagaatggtttcctagaagcatagtatgaaacctactattttagtgtgtgtatctgctcagacacatttctgaaagagaacactttatctatgtgagcaaagaaaaatagtataactgcagtaaaattttcacattatgaaacctcaaggcctttaaaataattctcatcatccaaaaccaattctccatgtagtgttctaatcattttgaacatagtttacatattattctaattatttgattaaccgcgcctgtcctattgaatcaccatccagcaccttttcaatgccctttattcttagtaaagaaaaatgtgcaaactttaatatatcatcaggaaaagccaatgcaaaatacaaggaccctgaaaaagaaaaaaaaaagacaacatttaaaaatgtaatattttgtgcatgttataatcatcatttcagaggaaggaagcaattctaaaaacaaattttcaaagctatttttacattaacattattttttctaaatgtgcatccattatagtagagttatcttttccttccttaagctcagaattaagtcaatttcctggtatgcaatgtggctttattttttttgttatttaaattgtttagccaaagtgagatcagcaactacttatttatatgtttgagggcactgtgagctgaaataacaaattttgtataacttatctaactaaaaatatttataatacttctcaataatgattctaatgaagatgtattgagtaatttattaccatcttttatgttttaagagttctgatagtacaagttaaaaaaaaatagcctacttctactcttttactgaaatcaaatagatggcatgtgatgattaacataaaaaagaacacattcaacataatatattgcgatagtggcagtctaatagaaaaatagcaactatttatttacttttatttattcgttttatttataatagatatgtacaaaatgtaaaattatttctaagaagatttttctttaaacaccaagcattacagtagatgttgtctgaatgtgtgtaattgagaataataatattgtataataatattaatatgattgtggctagaaggaatttatttgatcacataagtacagcaaattaagaataagatctcagcatatcctggctactacataaatgtagcaaagttattttgctaccttgaaaaaaatacaagacaaaaaattgcctaatttcatggaaaaactataattttgccagttaatacatgagattctcaaattcacgaatttaaaatgtttaaataattatacttttgctgcctgaaaatatattggatcaaaatttcaagtaaatatcatcaggggatttggatggggaagagcaagaggggaagaaggaggagaggagatttagtctagcactatttccagctgatccccacccagcattgccaagctacaggacaccaattcaataggatgaagtcagtcaaatcctcttttaagtaatggttgaataaaataaaatgaggggaagaaaatcaagtactctaaatgattaaagcgtatgaataagtgaaaaatgtttgcaaaattgagaaggaaggagaatcgggaagtggttatttatggtgtctcaatatgtaagggtaaaaaaagaaatttaatataataaggataagctaaaagcaaagaggaaacgttgaagccctttacctctcactctgtgatgtatagaaattctaacacagctagatagtttttcctcctggctatctcaagtgagtttgccaattagaaagaatatttgtttattgagagagaatagaaatctgagactcagataaacaaaaactgcctctaacaaggcttgcattcttacagactccagtagaatttatcatcctcatagaatcaaatggtacaaattctccccctcccctccaatctcttgctgtgactccatcaacaagccaaaggcttgttatctttgataagcttgtcacctgaggtaacagtggagaaagtgagggtaaagaggtgaaagattacagtgagaggtaagaaaggatatatcaactctggctcataggcttctaacttgcctaggtggatgtagatgccaattactgaggagggtcaactcaagtagaagcaaatttctgagaaaagaacaagtgtttaatttttaatgttagtttatggtgcctatgagacacccaagtggatatatgaagcaggcagttgaattctagtggttgggttctaatggattctggcctggagaaataaatttgaacgtatcagactgaattgaagagactgcctatagagaaactgcaaagagagaaaaaggggaattaggactgagctttaaagaacaccaacctataaagcatgaaagataaaaagagatattaaacaggctgagaagggggaaagagaggtacaaggaaaaccagcgagagtggtaacacaacaagtgagaaaaagaatagaatgttcatctatggtgagtgctgccaaaaggcataatgagatagttaatccaggcctccacatttctccactatattgatatatggcttttgaattggtctccctgcttcctgtctcaatctctccaatcgattcctattcctcctgacagagggtacttctaaaataggcaactctctctgtcattcttctgctcccattcttcaaagctccctgtgtcttcaaggtccttagcagttcatacacctaccacatggttaatttcaaagtccttagcaggtcatatacctgctgcatgacctggccccacctgcctctccagcctcactgcactcctctccccagtgcatgggaacctccagctctaccaagccacctgtagctccttaaacaatggcttcatgcctctgtgtttgggcataaactctttcctctatattggagatttgtctcccacttctgtgcccaaccaagtcctactcnnnnnnnnnnnnnnnnnnnnaaaccttgacactccaccacaccccaagctcagttaatcatgcagccttgcatttgcctctaaaacaacactctgtaattaatttttttgtcttttcctcttaattgtagggtattgtcttgcccatctttgtatccaaaaaaacagtgatgcgacatgttagatattcagcacagatctgttgagtaaatgactaaatgaatgaaaacactaaaattctgctttgcaatttttcttctacagctttctgccatacttctttattactcaattggaagatgtaatatttggtaatgctcaagaaaacacaacttagcttctttttcctcatttcatttgaggatagcaccttttggactctgattttcattctttggctgcaaaagagaaacatccagttttactggacttctaataactagctgctaaaagaacatgaatgaaagtgtgaaaggctgtaagatggactcacaggatccttggcatatttcatctactgagagcagggtcttcttaagccaggagtcagtattagtgtctcacagctcatgtttcggttgatgaggcatgggatcaaaatgatattagtcatttgattgagtgccttatgcagatagttactgcagagttttaggttgccatgatcaaactgtagtgtccaaaaagattataaaataaatgacccttgatcaatctaacctaattttgacttgttaataaagaaaggtagacatgtattcaccaattaattagacaatgttgaatgaaaatgaaaatcatcccattcagctccctataccctgatttctaatgattttcttaagagttaattgtatctctcaattcaggggatgctgtcagctttggtccatgtgcaagttctgtcttatgatatggccacaaccccaaatattggtaccatcattgttctctgtttaaagtagtctttagaatttataggccaaaaagtgagtacctttctgtgtgacccaaggcattgaatagatatattgatacatctctgtacagaccttatgtttaatcaacattcattttaagtgtcttgtcctgtgaaaacttctatcattttctaagactataagcctatacttttagttagtttaggctgacagtgattgcttgaactatgacactgtattatgatacagtgagacaacaccaacatttgtgacactggcattatgcttcaaagaaaagagaatggaccctagtctcttaagtaacctgacagctctggttccactttccacaatatgataccaagtaaaatcacatgtattttctcatagaaacgagccttcccctaaatgtcacatttcaaatgttttcagctacttattaagtggtcaccattgtttcctgcatatgtattatcttttaaaaatatagttgcccttttatttagtgtggactgcttaaatacaattacttcaaagtgtattatattttaaaggcttgtgctttctgctgtttaaaaacatcgtgaatatgataatcattctttagcctttaaaaaacagtagaccctaatgtgtgcaatttagccacagttgcagactttaatcataaattattttaaaggggcacacatatcgcagattatgtagctgaatggaccaagtttggaatgagcatctaaaaccctgtatacattttagtcattaccagactggcaaaaaaaaaaaaaaaaaaaaaaaagcttcagtgatagcctctagaatgccattgaaccattttaatgtccctctgtcaataaaaatattccaatgacaagtcacagttatcatctttagattcaatttttataaatctttgtttagcctaaaccttatatatcaagatacagcccaatccctaatgttaactaggcacaaacctaacagcatgctgtctccccaggcagaacatgtgtatcagaaaggcagaagaacattgctgcctaagaagtctctttaagtatgcaaagggaggtattatccgctttgcagttgcttgccttattaactacatttactgcaaagatgccttatgagtactaggctctggaaatcatagtcaaaataaaaacattgcctgtgaaaaggcaacatctttcacttcaaagtatttatgtaatatttaacatccttctgttgtagttcatgatttaataatagttgcataagtaatacattgatactcatttttcctcttgttctacctaaacttttgaacccacagaaagtagtttcaaccaaaacaggcccaagtttatttgctttctcagtagctgtccctgcatctttgaaatgaaatagatgtcttgatgcaagtataatcggaagtcagatcagaataatcaaatgatcaaattacttaaattagacacatactgaattgcctaaagaagaaactgctcagttgggaaaggcttacagcagacagtaaccttcaatcattttccacctctggaataaatattgagtcatattttgaaggataggtgatcttaaggatactaacaacaaagattggtacagattaactaaccattgaaagaaaaggctgattgagtttttgttcagaataaggagattcagacagagaatctaaagcattttgggcatgacaatgaaaaaatatgaaaattatataatatggattttaatactaagaatgtatatagatagtgaaaaggctaattgtatgcactgcatgtagcctagggctctcaaactctggggacctttaccgttcacattgattactgaagactgatcattagggcacaaaattcatcatcatgtttaaaataacctgttctacctaataggactatttggaccattgtttggtaattaaataccaaaatgtctaataacctgtacatggtaggtactccatttattcaacaaatatctattgcacatccactatgagctagtcatttaacaaaaaattaacaaatatttatcatatgtataaatgaactaatactttttgataattggagcaaaacaatatgcattgatctaattaacatgtaatttgaatctaaactttatgtctagatcactgaaatataagcatattttaaattcagaatgtattcatttacttattcattttttcaacaaatatttattgagtgcctattttgcatcaaccattgttctagttgtgaagagtacaacactgaacaaagcagacaaggtcactttccatgtgtaagtgtacattctagtgaagaaaacagacaattaaaaaaatcaagtatgggccaggtgcagtggttcatgcctgtaaatcccagcactttgggaggccaaggcgggcggatcgcctgaggtcaggagtttgagactagcctggtcaacatagcgaaaccctgtctctactaaaaatagaaaaattagctgggcatggtggtgggcgcctgtaattccagctacttggaggctgaggcatgagaatcgcttgaacccaggaggcggaggttacagtgcagtgagattgtgccactgcgctacagcctgggggatagagcgagactgtctcaaaaaaaaaaaaaaagtatgtaatataccatgattcagagaggaaataggtgctgtgttagatagggcactcagggtaggtttgttagaaaagtaatatttgagccatgcaagtatctgagattaggacattccaggcagagggaacagcaagtgaaaagtgctggtggcagaagcatgtggcatgttggaggagcagtaaaagtctagtgtggttggagcacggaaagagtgtataagattgatcagaaataaaatggcataggtagtcaagagccggatcacacagggcctcatgaaccacggtaaggactacaagttttattctaaggtccaggggaaggaagcctttgctagattttgagcaagggactgattctcatttacattttaaaggcattgccctagctgcagcatgaactgacttgaggaaaggcaagtagaaatgggagagcaattcagaaactctcttatttccctggtaatttatacatatggacttatcttttgctgttttttatatcctgagcatcttagtatcctaattgtggactagcctctaggtttttctataatcaaggaggagtatttttaatttgtatacatttttactaatttttctatacctttgtattccaatttatatactggtaatttttcctaacattataatgagtattttgtgatccaagtgactctgtaatctatgagtatgatacaaagttaaagtcatcacatttctttctaaatattttacatatttttaattatattctgttacttttgattagaactttacattttaaaagtacttttgccgattaggaaaaaaaatcctaaattagagaacaaactagttcatttatttaggggctagcattttatcaaggaaaacataagcttaaacttcaactcctgtgaaggggcccctagctaatacaacatttggatgaataatgaaagtatcctgcatggtttgttggcccaggtcccattgtaccttgatatgtgtgtgatgataatctatctaagcatgctccaaatctgcctgcctgataactgtcaagtctcagtagaccttatgtcagtgacaaaggtatagaacacatactattcagagacacaacaaaagttatcacccagtgattttaaattgtaatcaactataagctaacttatttaaacagaatttatgttttatgctatgtccatatatagtgtgacacttaaagatatttattttgaaaacaagataaaagataatatgtaggccaggcgcagtggctcacgcctgtaatcccagcactttgggaggccgaggcgggtggatcacgaggtcaggagattgagaccatcctggctaacacagtgaaccctggtctctactaaaaatacaaaaaattagccgggcctggtggtgggccgggcgaggtcgtgggcgcctatagtcccagctactcgagaggctgaggcaggagaatggcgagaacttgggaggcagagcttgcagtaagcggagactgcgccactgcactccagcctggatgacagagcgagacgctgtctcaaaaaaaaaagataatatgtaaaaataaaaaatattttgaatttagagtttataactgagcttgcttaaaatagaagactgacaatgtataaaatggatgactagactgggtaaagatgaatcagatctctcttacacactatatataatatatacattgaccaaacaaattacagtaattaaaatactgccaaatttcaggtaataactgataagtctaatgtttgtcaatagcttgttggtttcataaaaatgatatttcctcttagaagtaattcaaaacacccatttaaaaaaacatattatattcctgtagcatccacttactattattgaaagaaaagtctacatttgtttatgcagcttaaaaagtcttctgagatgaagccaagagcaaaaccattttgtacactcaggcttaagaataatatcaattgtttatccagctcattcttgtcttcctaccacccttgcagtctttgctgattcttctctgctggatcctttgctacgtgaatttagcaagttcctctgccttccctgacccctagcacagtgttttgcacagagtagccactccacatagaatggttgagtgaatgaatggattaatgaggattcctgtttgatttttcagcatttctttaatgtccttccaatcagtaaattattcagtgatttgtaagtgtccagggttccaactatgctctttatcattggggaatgcttccttcctggggtggatgctcctaggttctttgttccttctttatctgtagctatagtcacttaatctccaacccgttttcttcacacagtttagtgaaaaatacatagacccatgaatcttgcaatgaggaattcagcccattatcagtacctaaaaaatgcttttgagtgaatgatagatttaggttaaaatacaattctgagttacttgacttatctgggatgagaatgacactgttagggggaaatcctcagtggagaaaggatttacatgtcctcttgttagaaggcaccagggagaccacctgctgaaattctactccttttccaagttccagcttaagcatcacatcctccgtgaaagcttttttgtacccgccaggtgtaagtagttattactgctcagtgatagcaaaatacattttcatgctaacaagcccaagctctgatgactctgttttatgaatatttgttttcctccttctgttgtgatctctgttgccaaccgtaatcacaagcatcatctttgtctctgatgttcagcctagtacctggtaccaagtaggtgctcagctacacttatgtgattcaattgaattaaatgagatctatggtaaactaaaaggtatatgcctcagtggggggaaaaaaaagtggcagtaatagctgcagacctccaaacacctttgaccagaggaccttacctggggttcactctaggagggtactcacagatcctttcctttcttactttttagagcttaatatttttgagaaactcagaagcatttttatttcaaggcaaaatgttgaaatatttctacttaaagtccttcatcgcaagagtttcagaatagctcacaactatttctgaccacacagtcctctctcggagcaatcagaactcaccggcaatactgcaggaagtcagtgaggaacggctggtttgagcctgtaaactaaaatgccaccatgtgtttttgagtttaacattttagtggacaaacacataagatgaggacaaagagagagatgattcccttcatatgataaactctgcttgaaagtcgcttttacacagacacaaactcaaatagttgtttacaaagaaacattatcttggtccagtggaatgtctccatgcacatatttctttttcaaagtttgtttaaacaacttagaaataaactttcctgatcaaaatcatgcaaaaactatttaccaaggttgataatttaaacatttttaagcaaaatgtcaaaactaatatttttattttaaatgataaagtacagtgttttgaaaatattaaaagtaatataatacttgtgctctaccacctaatttgaacagatgcaaacatttagcatatttgcttttgatcttaagaaccataatattacagataaaattaaggtgttctcctaccttaatcatatttcccgtcttctctttccaggtttcaagtacagtactcctataaatatttctattatatttgtcttcattcaaatatgatatttattatagcatggtataatatgtattaaatattattttttaaagtaaatttaaagtaaattgaccccaaaatcagtaagtaaaagattgatataatcatgaagggtaaacatttggtatcagttctaattatgaagagttaataccagcatgatttcattagtactttatttttatactcaattatagcagtataatctttagcaaacatcaattgggaaataacatgttacaaaaacactaagaattaattccatgatgatttgttgcaagtgcacaaatgtcaccttattttcctacctttatatcataagatgaaaaaatctattgaaacttgtgaaattgaggatttgttgttttcatataccacctgtccttcattttatatacacacacgcacaatcacacacacttactcactgcttatctctgagctccctgagagccaagaccaaaggaaaatacaaaagatcttataactgactcgattatctaataaaaggagatgtgccatatcaccaggtaggactaccttgtgttctctgaaaataattatcatgagtgttcttacaataagataaacaaacataagccaaacaaataaaagccacctgaacaatgtagtggccaattattttcaaactagcaactttaccagaatgcaaagctgtaatttgtctgttgtttcttatctttcatggataaaatccaagggcatgatgtgaaattgcagtttcgtgggaaatctaaactgtaatgatgttcatacacatttactcctaaaagccttttgtcaagtgaaagcataacagagggccagttggtaaaacacaaacatgaagccaccccgatcactaaagtgggtgtgggaatcctggcgcttgggaatgtgcttaaacgttcaatatgataatgacagaatgcagcaagtgggaatctagtctaccacatgattcaaaagtgatttttttaagtaactttattgtattgtttttccttccaactttttattctggggttttcatgcttcctgactcaggtgtgtataaagacccatccagtcggagcgaccgcacttctctgtgatcatgaagttacccttggttattgaatatgttttccagcttaatgagcaagcacatacacatgatgctaatgaggaattttgcttcaagatacttttaaaaacgtacatgaggaagaattgtttgctttgagtattttaagatgtaaatgcagctacttctaaaaagaaagaataatcctgaggaaaaggcaatcgtgacctatgacaatggatggagaattaaatcctgcttccatctatcatatgcactgaagagggacgtgggagcaacttctgcctcgaaaggagccttgtttgctcactaacacagtgggcgttaataagtctctgctgcccctgtggttttgtttcagtcattttaaatcaaccctggaaccaggcagagtatacattaatacaaggcattattctccttcagctgtagttaagggtgcttgcatgctgtcactgttgtgatagaagcctgtttgcttctgtcccaatagtgagggcagaaaactctccctatgaggaaagaaagctttcctgagtcacacacacagctgcctccctccctgagcttggcagctcctataataagtttctagtttggaacgtagtacagatcaggaaaaaagcaggaaagagtagagcaggaaggacatggggtgacatttttgccttagtgcttcactacaatatgccttaagtagcgagccaccaagccctaatgattcttccttttcttccatatagtgaatgcctcactctggggctttccttccttgtctctatacctaacagcagtagcctgggaactagtccctctgcctgcactctactgctagcgccatctttctaaagcaccgctttcatcatgttgaccttctcatcacactgtgctcaaaaacctttcaggcctcctcattccccagaagataaaggtcactccttggactggaattgaggccctttgcaatctgtctagagcgttgtgttcagccacattggatgggaagagttcattctaatcagactgatctgtgatcctcccagcacactgtatactgtcttcctccatacatttccccaggcattctctccaccactcttcttcatctaaatcctactcttctttccagacagttcactttccacctcctcctccctatcttatgagcattaaacaaaagagtcttaaggaagtaggagcaaggcgccagacacaggggaacctcatgataatttcacccccttttctgccacttggtcttggttttacttggcaaattaattctgctgacagctttgccactgatgttttttagatcagtgtgtttaatcacctgtccctctcatctgacaccaaacacattgcatggagtatgtgccatatgaataaagccttttaaagcatgtcactgaatagtgtacattaaacaagaatattaaatttcttaaaatggaatgaataggaaagggaaaaaagatgtggctggagtcagagtagctgagatttctcaataggggatgcaaaccttctcccacagaaagagctaacttgctttaagatactgatttctgaatgcccctccagatattattgcaccaaaatttgtcacaataaatcttatatacagtaaatctggaaaatctcttagtcttagagggtgagaaagagtatctaatataactccaactcaccatgtctgcacatcagaatcacccgtagcatttttgacaacagcgactacctaggcctcacaccagacctcctaaatgagaatctctgagttgcaacccagtcatctggtttttttaagtatgccacagaagattttgatctgcatccagaatttgaaatccaggatttgaaagccagaagttaatgatggacagtatgtatttgattacaacttctcagaaactttgttaagcagttgatatgcatttagtgactacagtcttgagtcattatctccattttcacaggtgaggattctaaagcttgggaaagtgaagtagcccagtgccatccagctagtaaataagcctcattaaatagaggtctaataccaagttccaacctgtagtcacattctccatctgtctttattataattagacattatttcaatatgtggccatcagtctctttcccagcaatagttccctctcttcaaaatgtgattccgttttttggaagtcctgggaccacccagggcaagagtttcgcagctcagttttcctctgattggctatttgttgtcctagtctatttctgatcagtgaggaccagtattcccaagaccttccccatgtaatgggccaacttctatgttttgcatccttataaagagatcgatactaatggcaactaagctttttccacgtgcaagatgagcctggccaccctggaaaacctgagtgcagtcctgggtaatgtttctggagaagggcattattcattcctcctagatttcaaaactaaaaggattgcccactataagttaaaaaaaaaaaaaaaaaaagtcacctgagacctgagtaatgacatgggagacttattagccttaccagtcagttaatgcttttctaccctttgaatacagggtttaatttttcaatgcattttcacatctcttacctcattttctctcacaactcacagtcattcctgcactgcagtttccttacagataaaatacttataatcaagttccatcaaaaggagtgatgtgagagttaatgagtaaatgggcttaaagtatcataagcatcttgaatgaaaggtacacactgtttttactgttattaatataatgcagttcatccattacagatctgacagggatcacagacagcagctctgaccttatttactggccaggccagagagggtctgcgtaatggccccagagacagacaccctcaagagaaacaaaaaaaccacagttaaggtccgaaacaaccagaaagccagcctcactgcggtatagttgggtgctttgaaactaactaggaatattgtatggtcaaaatacggaatggacaccaagtcaaagaccttgggagaggaataagtgacagccatgtttaatagatgaaacaaaatctagtgaaattagagggcagccacaaaccagacacatgaatatgtaatttgctagctgccaggttctgcattctcacactctggcagatgacaaggcacttctaaatacacagagaagcttatttaactcattgcagatcatccttggaagagccatttcaagtgaggcagggaattaaattaatgtcaaaccccccgaaaatattgatgagatagttacaaatgtatgtgagttgtctcaaatgctaccttttactgctataatttaagttccttactccatcaagtggtctttaaaaattatttcctatttctcttctatcttataattcagagagctaaggttttcagtcaatgttaattttctttgaaggattttcagagggtagtattaccacatacagacccctgaaattattattttcgagtaaggctgattctttttctttgtagcctagaagaaaagagatctatgtaatcgcagtgtcaaaatgtcaaaagactgagataggttgaaaaaacgaagaagaaaagaaaagaaaacacaaaaaaccttaaaggcattcgtgcagtcctcagccttacaaatctttggctcacataaaatacttgtgacatgctataattaactagttactcctctcagaatgaataataatgcaattatttgccaaaagcagtgaagggatagtttctgttttcaaaaacgtgtgcttttcatttctgcagaaagaaaaacccttgattaatttacataagttggtaaagtgacctgcagtttcaccattacattatatgataattgctaccttttttctttttcttttttaatcttcaaaacgtatttttaattatttatttagagacggggtctcactattttgcccaggttgctctcaaattcctgacctcaagtgatctttctgcctcagcctcctgagtggctgggactacaggcatacaccactgaacctggctcttctgtcacctttttatcagagccttatgtttttcagtggtttaatgtagcaataaactgacaagttgctatcatgttcaaattatattggtgcctgaaactgtacccaaataccacaaatgagaagtagtagcctgcctggtgaaaacattttcttgccccagttggactttgatgccatcaagattactaactgtttgtttcctgtttcctttgtctgtggaaacacaaataaaaggaggacagtgagccttagttcttcaggaaccccctctcctttggagaccccacatctgccaagtagcacaaagttatctctcctaggtgttaatatatagcacaatgaatattttcaactctttcaacaccatctgccattctcagtaatttattcaacaaccatttattgaagatgtttgtaatgcactgtactaggtaccaggatgtcaaaggtaagtaaaacaccttgcccttgagaaggttgcagaaaagtagaggtataaacaagtaaacaggtgcattaccaatgcagtaaatgcaccatggaggtgagtgtgagccccccccacacacacacacacacaaattttttcactcatataaacacacaaaaccacctctaccccatgaatgtaaacttccccaaattcctctttgaaagttttgaagcagacacctggaaaaaaattaatgctaaaactctctaattttgtaatttcagtagagttcattgagctatacatttgtgtgtttgtgtgtatgtgtatttgcgtgtaaatattagttttcatgtggatctttatatagcattttatttaaggataaaatattttgagcaactgatgctttagatagtcaggttaatctaatgcccataaaattagttactaattctaaaaccaggttttaatttgcaatgtcttaaaactaacattcactgatatatcccagtgatgcacaaaaagtctggattgcttgtttgagaagacaaggaccaagagtcaatatgatttaaattcataaaatcatgacatattccaagagtagacatagccttggttttcaaatcctatttactcaaaggattcctttaatcagagagtgataggaatttgggtctgtgataggagtttgggtctgtctttctttgtactttcagtatgtagaacagggcaggctctgacatcagactgcctaaatttgaatttaggctcttcgattttcaagctgtgagacttctccaagtctcaattttcttatctgtaagatgggcatagtaatagtaacttttagaatagcaacctttctttaagaatgtaaaattgttagtgtattcattcatttcatttagctatccaacatgtagttattgaaagtttcatgtgtgcaagatattgggcgggttggggattgcaaagataattcaatcactgcaaatagagatcaagatggacttagagtttcagaccatggtcttggaatcctgcatgtttttctaactgaataagcttaatagacatatatacatggaatatagtaaataatgattatgtaatcagagtttattggtcttttggaaacatagaaatggtaggtccttggtaatccagtcacaacatttccttttccccaagcttcatcgtttttgtgttttgttttgttttgtttttgaaacagagtcccactctgttgcccaggctggagtgtagtggtgggatctcagctcaccgcaacctccgcctcccccgttcaagtgattctcctgcctcagcctcctgagtagctgggattacaggtgcccaacagcacatctgactactttttgtatttttagtagagtcagcctttcaccgtgtcggccaggctggtctccaactgctgaactcaggtgatccgcccaccttggcctcccagggtgctgggattacaggcatgagtcaccacgcccggccagcttattgttttcaagccattttagcaaatctttgaagtttcttccacttattcacaaaaaaaaaaaaaatattctccatagatttccaatttccagtgattgctgagagtcacaggaagtatttttaaaatgtactcttgcatttatttaatatatgcaagtatatagagtagggagcaaagatggaagttaatgatgaggatatgcaattgagaaaaagaccaatataatccatgcattcctgaagcttatatcccagggaaactttcacctcaaggaatgaatctatgtcctcctcttgggctgagaataaaaacatcaaccatctatacctgtttcttagccattccatgaaaggctttatttgaggcaacaagagccaggaattttgagaggaaacaaatcttaaaaggaggccttgagcaagcgatgctaggaaaggaaagggggaaggatgtcagcagcagaaaagctgtgggaccaaaatcagattagtcaaactgaaaaataataaataaataaataaataaatacaccaattggagaatcttgtaaaatatcccacacaattgttcaatttggtgttaaagcttaagtgaatttttcagtgaaacactgattctaaccagtccaattcaatcaaattttatctttctgtctgtattagtctgttttcaccctactgataaagacatacccaagactgggcaatttacaaaagaaagaggtttaatggactcacagttccacgtgggtagggaggcctcacaatcatggcagaaggtgaaaggtgtggcagcagacaagagaagagagcttgtgcagggaaacttccctttataaaaccatcagatctcatgagacttattcactatcatgagaacagcaagggaaatacctgcccccatgattcaattatctcccaccaggtcgctcccacaacacataggaattatgggagctacaattcaagatgaaatttaggtggggacacagacaaactatatcaccatctctattccctttgcaccattttgtcatgctatcaaatgggtttctgaactgccaattactttctgtctatatatatatgtgactttttcactgaaacatttagaaatgtacactgtatatatatataatctatttacaaaacatttacaaaaacataaatattaataaaaatgtaaaatatatatatagtgtacatttctaaatttctttggacttaatttggatataccgtcaaagccctaatatcttatctaatttaccatttaggtagacaagtgacagaacatacctttctgtttttcagttgctaacaaacaactttatagaagaccttgaaggagataattcctagagtctaacacaacaacagtcagaatctaaactggtttgaaggcaaaagaaactacctttttaaaaatgcaaatgtcaacctcctcactccttttttatttaatacaatgattaaggcttggcctacaaagtcacttatccacatccgctctataagaaccagaagctctttgaacatgtaggcagctcctgatctcaggttttcagatgccaagaatcagctgaggtagcaatgtcatgttccagtagcttgtgatcacatggcaacatcaaagctaaggtaggaacaccgctcctcaatgagttaagtgtttagagatggttgccatctgttgtagctatttgttcctaaataggtaaatgtaaaaataaccaggcattcctacagcaattctcttacaaaataaataaataaataagtaagttcattagcacattttctgccagcatttttaaacagcaatctaggtaattctgacacagatggtctaaggactacactctgagatgcactggtgtgtatacaaagcctctctcaatcaacagactgatcaagcagtgattcccaggaattgagtctggtgccaggatgactacttaagaatatagaatgttagaagctaccctagatttactggagcccagaaatctgcttatgaatctgtatacttaaaagttctccaggagattctaataacacagtctgtggtattagagagagggggttgggttttagcttaacaaatctatgagtgggaccttattccacaatttactagtgtctaaccttatgtaatgtctttggtctgtaaaacagctgttgtgaggattaaataaagcaatacatgttgagagtctagcatgtagtaacctgcttgccattgtatgcctagctctcagtaaaatatacagaagtaaaaatgtatgcttcatgactttgagaaacatataatctatttacaaaaacaacataaatattaataaaaatttaaaatatgagtttatattctaaagctgtaacatggttgtacacatacaccagaaaacacacaagacacaatattcagaataataaaatagagaagtgtaaagatataggaacaatcatataaaattttcttgaaaatgtttaattcttctttaggtaacctaattctcattaaatcactgaatttttatttagattatagaaaaatattaacatcatgagtggcaatcaacttgtatttattattttattatttaaaatgagaggtagaaaaatagtagtgtatatctcggaaggggtttcataggatatgcttaaaggggcccaagacaaccctgaaattttatacagaagggttgtttatatgaatatggatatttctggggagagatctatagctttcatttttccaaagggttttgtggcccccccaaaatgttaaggaccattgaagattggtccttttagtacattttatgtgcgtccttatttatgccaaagaaatacgactcctgattgcatgccaaataatttacttgtttgctttctctgaactgtcctctgagtcagttttccacaagctttaaccattcaaatatcccaagaaaagaaggaagagtaagattcaatttaagaaaactctaaagcagagtttcatgacctcagcctattcatattctgcagatatcagcatggaaatttatgtacatgttttaaaagttccagggcagaaattaactgatgatcatttttgagtttttccttttcattttttatccattgctcagttgtttgaattattttccattagttctgtgtttcttttcttctcagttagaaaagtgaaggaacttccctggaaggatacaattcaattttgccaacttgcattttgtcaacttagcaattctttcatttgtgttttatttataatgtggtaacaacactattgatgttacatgtttttatttctctctttttttaggtgtgtgtgtaatattgactgttctcaaaccaacttcaatcccctctgcgcttctgatgggaaatcttatgataatgcatgccaaatcaaagaagcatcgtgtcagaaacaggagaaaattgaagtcatgtctttgggtcgatgtcaaggtaatgttcataccaaaattcatttcaaagaatgattttagtctttgtgcaaaaatgaaaagtgaagaaaactccttattaggcagctattccatttccaaaatgcagtgcttatttacaatggatagtagagtctactgtagcatttgtgtcgattataggattttgaggggctctcagcaaccgtccagatctgtctctatacaatggaactgtattgtcacaatgccataaacacagaagccaatattcacaagatagcagacaattttcttgcaaagggaaaaaagaaactcaaaaacatttttaaaacgaatctaagaatttattagacatccttgaaactaaaagcaaatcacttcatttttatgtattgattcagtacaaatatttaaaatgcatttttaaaagcaagaggtactagaatgttctattttctttcttgttcagaaacaagcattttcttaggttttgttactcctttgcccaatttttctcagttataattgtgaatcttcttcttctcccaaactttagaaagctctcttcattttattatttgctctcagacagaaattgacattgtaaatctgtcttagtatgatgcaggttgcttagaactacagttgtaaaaattccttaattgcaatgaagatattgttggaggaaatatataagtttgatattagatatttaggaagcagttaatcaatttttattgttaattttttaacacagataacacaactacaactactaagtctgaagatgggcattatgcaagaacagattatgcaggtacataatattttcttctacaaaatgtgagctcttctattaaaagagagtcctgggaaatggttgtttactacttattccaaagtgaagcttgcaagacttctaacatgtgctagccttctcttgcttagttcaagctttcattaggcaagagtaattttttgttgaagcaaagaagacatacggtttttgccagagttaaagcaattgtcaaaaatgtcactaagatataattagcttgtctttacagtgcaaatagtacaaataacaaaacatttatcaaattaatagcatcaatggaaatgaatgcaatttctggcaatatattatagtaaatgcaaatgttcttgtttaaattttcataaaagtcaacaatgaaaagtttgctagtctctaaaaagctagaaaggacagctacaaataataatgcaggttgtctttatttagatgcaaagttaaaaatgtatgtataggtttttttaatagtaaatttctttaacttattttgaaactaaaatgtagtttctcagacatgcaaaattataaagcattttatataaatataaatcatatttaacaattatttcactttgaagaatgtctctagctaatctaacttttctagagtgagaaataattcatgggtatacaactgaaattttaacagatacttaaattttatagaaatttgggataaaatatataaatagtatataggttgataatgatatgtgaagttttttaggcagagcttttcatttagatattaagcaatcataactagatttatggtaaatattcaatcaaaaagagttgtttcttgtcttttaaaatatatactaccatctattctttctttctgaaatttcattttctttaacatcaggataaatgtgtatgaaatttaaaaaattagttaatatagagatctgaaatctcttagaatttggaaataaaaaagatattttaaacatttatattttaaacattttccacattttatcttaatgtttttcaatatgtagatggattttttatgtgctataagacagaaattatcatggacaattatacatggaaaaacattggttctaccaatgtatagccattcccaaagcgtccaggagagaaatttacagatgttccttgaaaagaatagttcagtgatctgtaagtttggaagagctcatacaaacaaatgggtcttctacccagaacttctcacagctcttatgttcattataaaatatttaagagacatacatcttttatttatttattttactttttgttgtggagaatttcaaataaaggtaaaatacacaaatgtaggttctatagcttactgaacccacaagtactcatcattcaagcccagtaacaccaacccgtggctaacccagccctgtcctcacccctatcctttttccatactttcataatatgtggaagcaaatcctgaaaattttatcatttcattcacaaatactttagcatgcatcttgaaaaaaaatcaacaattttttaacaaagttacaatactgtaatcatacctaataaaattatgaatagttccttatagtacacagcttttaacaaaattgtttgataacacatttttgtggcatgttttgcagtattgtttccaagaatgtacattgtgatatgctgatccacagaaatattatcaaaaataataaaagataataatgaaaaataaaagtctgaggctaattgtatatattttaaattttaaatgaaaacaaatttaaattgtatatattttataaacaattattatattttgatggtattataagccactgctactaactgcaattaaaatacctttactcctattttgcaaactaattcatttggaaaaatcttcaaaaatgtagaatttatgcatatcttctttagtgaaccatccgtctttgtactcattgaaaaatcaagcctctccctgagaattttgttcctgaaacaaagaactcttcaagttgatcagtgtcaatatacaaatatatatgcatttataaagttattccaataaatatcatgagagattctactgatctctcaaagtcattcatattgcatgttaacattttgcccatttcaaagagatttgataattgaatttttattccaaaaagtatttatatatgggtttggttttttaaacagattatctctaatgttgagtgtcactgttcttaattggcattttttttttcctatcttactgctttattaggcataggaagaaaaaaatacatttttaatacatgcaaatgaaaactcttctgtcactcattgtagtccaggatcttctagtttggtgtcagatttatcctgcaaactctaaagaaaaacttttaagataaaagtaaattttaaaaatacatgtttgttgaaatccaagtataagacaggaacaaagataatgtcaattgaagcttgtaattcctagttaaacatagattgcatacgtcaagattctcaagaaattttagatatatttgtcttcattaatggtttcattagaatacaatatacaccctctttagaaatcatttaagtaatagtcatgttcctcaacatttccaagcttccaatagtatttacagtttcctgaatttgggaacacaaactgtggaaaaaattaaaaggaaccaaatagagagtctatgtgtcattgtcctcttaattactatttcatatgctaaaatctgtccaaggagggaaaacaggaactgtgtgactcgtatccctcaaactttgctgtgtgctcacagctcatttaatgtcacagccacttcccttgttagacacacattcacggactctcccacctgagggaagtaaggatctaacatactatcatttttgccttatatctagttaacactatagattaaaaacccttatttatccctctcagttttttctttgagcctactttaagagctattaatacaggaacacatgtttctgattataaaaatggagatcttccttgaaagaaagtctaaatcttaaaataaattaattgtatctcatttttaatatcagttaaaagagatcccagcaaggatcagcaggaggtgaattaccaaaacgtgcaataaatgcaaacgaagggagcaatgccttcaacaaaactaatatgtgcagtatactagagtgtggcatacttgctcagagatgtgaattccatgatcctcaaaggcacataaatgtagtcaacactaggaaaccaaagaatttgctcaatcatccctgccagtattactttctggttgcatttgatttggatctctattctgccctctctcctttaatgagacccaaggcattacagagctttgaataaagggctttggatctcttcatttcaaagcccagtgacaggatacttgtcagatgagctaaccaggccatttaatgttattctcccttcatcaatataagacttgggcttagagttaggtctgtctctacacccacagaaagattcgggaacacaaattttacaaacacacaaagctagggctttccaggcttttcattgtcttaaattgctaaaattaaactgtcctttgggaagtttttaaatagcaaatgttttacacctcttgaaatttgcaacattttctttcatatatatgtgtatatatgtgtgtgtgtgtgtccctcatgtcttctaatggaaaagaaaaatgaagttcaactatttgtttttctttatccagtatatatatgtatattttctgattgtgttgtttttctgtctaaaagtttggtcatgcttcaaaaaaaaaaaggctatattttttccagtaaaaatgtacttaattttataagttgttagatattttataaaatgaagtcagatgatattggttttaattatctagaaaataaaatgttttttattttatgacatcctacaccagttttcagagtttggagtgttttataattaaaatacatttgtatttttcttccatattttttaaattgaaattgtttaaatagaaattgaaaacataaaatcagaattgttaaagaaaatacatataccagcaacacagactattacagttactgtatttagccctaagtttctttgcaaccaatacaaaagaagaaattatggttgaatcaattcattcaacaaatatttgcagtcaccgcaatatgcaagcccctgtcctggggttttacaaaggtgaacaagtcaacataggtatctgctaaatgaaacttagatttttattgtctgataaaaaataaaaaataagttcagagacaaaagacaaagtttctctatgctaaattataaaggaactatttagcatagatctttctacaaggcatcagtgaaaaacataaaatgaataaaatcttcaacaatgatttttacaaaatacgccaagaggctctccgtatggctgggaatttttaaaatcaatttttgacaacatcctagagcatagaattaaaatatgtataactcaaggacagtgtttctatgacagactaaagtaatgactttcatttatgggtatttccaattttccaaattggaaaaaatacagaggaaatagctatgaggaggagcatgttgagcttattttcctcatggatacataggttgaacaggaacaggagtaaagttaagataaagactatgctggattatagtatgtatgtggggagaagatatttcccctggctgttcgtgaaaaatgtaagtcctggatttcatgtcctcggaggggagacagggcctccctatctctgagtctagctacaggcctgcgtcgagttcctgtgtttacttgttgaacattatactgtggcaattcattatttcttgtaatatttatttttaggaaaatttccattcctcatcttcaaacaataatttatacattaatctcaggtctgaaatgtggaagaaagaaatcagaaatagttaaacgacattctgtccatcctattagtaacatcccgtttttccacattaaaggaagctgacatctggaaagggtatctagatagtttaagtgagatgtcctaataacttgttctctgtagaagccattgcaatttacaaagccttttcatatatactgtctccttcagtcttcacaacaaacatgtgaaagagatactatatgcttttgacaggtgagatatgaggttcagggagattaaataaaaagagaatgtgatagaactaaggttaaaaccatcattgctaattccagaatccagcaagtgtgaggaccagggaagaagtgtcactatctaacaagtcccagctttgggactgactctgcaccctaagcgttaaccatttggcagttccagacccaaaaatatttcatcatgatgttacgttttgtgagatgctcaaaagagttactcaaatctatatattctaagcatcctataagtgatataatgtttgcttttaaatttttccttcttctgtttcctatttttccacatagagaagagaaagcaagaggaaagtgtttgctactgagtaatcctgcattaataaaaaaataaaaataaacagaaagtaaaaatttttagccatattgtgatatgtcatagctttactaagattcactcacattgcttcatttcttctatgtcaacccaataaagcactaagggtacaaatactagaggaaataaaattgagtctcaaagaagctaagtggctgagccggaaccggacacagtattttgacattttgactgcctacctgtgtaaatagggtgcttgcttgatttacctaatatttgccttgattatgcctcaactgtacatatttaggcatggatatcaaatgatttcatatcatatttataaaatgaattaattcagtcatgtggcaaaaacctacatttaaaatggaagctttttccatttgctcatgaacacaaggagcacttcaccagaaaccacgttttgtctgggccaataatttgatctgtaggaaataaataaatagcagcaaatgcaggcagcagcttgtagcacaaatattggtatcaacagtgaaataaataaaaatgtttgcccaggctattacagtgccaccagactagcctagaatatttaagcctaggaaatgaattaagatgtcaagattttttcaagatttctgagggaaagtgtctcattgcaagtattttcccctctgggatttacattagagtgctgcaaaattcataaagctttctatgaactctaactcacaatttttcctgctctcttgaacttctgtgctttcattgttttccccataaaatcatgtagccagtcatctgtaatattatgttatgttcatggttatagataaacatagaaatggtatttccaatacagatgaagattttccactgaagagttgccttgggccctggtagacactctggaaaactttgtatttatgcaccagttcataaacgcatcctgcatcatttatgtgcactttttcctatttgaaatgctcctttctgatacaaatcgttcaccttgcagtgttacttatctactcttctctgccataagtgtgcagcagctggtttagcggttgtaaccacaagattagagggaactgagtttaaacattggccatgctatcgtggtaatttaaccttgttaaattagttgaaggctcggtttcttgattagttgaagcctcagtttcttgatctgtttaatggagataataagtctacttccaaaggattgaagtttaaattaaaagacatcatgtaaggcattaacaagcaaattagcaagctagctattgttactttccttttggtctgaaaattgaagagaattgatttttatgggaaatagagcacattttatggaatatagtctatctgtatgatatgtgttcagagttgttatacatatattatcctttatggactcgtacaattacaagaagtttctggattatttttcctacccaagtcatctaacagcttgttgcaagagaccttggctgactttttaattcatctataaagaaatatttattgaatacttatttataagttttcagcacattaacacgtctaaatattcacaaagcaaattttctggttttcctctagtcaacataatttatgtatggtatatttagatcacataaaatataatatgatcatgagattattacaacatgaaattcaaatagaaattcagtaggaagacatagcttatgacacaactgcagaatgatgatatcatatgctttcctcaatgtaaccttcaaagtcaatcacttatactctagtccatatgtttagaggacctaaatattcattatttaaaaaaaggaatgtagtatatggaaatgtatttctgtttacataaaacattatttttcactcagaaatgttaatgttcacatgtcaataattcacacacacacacacacacacacacaccccgcaaagagatcaaaacaaatgtttttaatgaactcatagtaaagaaaagacaggtctatttagcatggaagacgaagagaaaaaagctatgtgagttcaaacatctagacaattgctagtggaatgccataattctccaccttaatttatctttttacctcaagtatatgttatttcaattcctaggaagagtaatgtaagtgcaggtagaatgtatgaagcttaaagaagagtaggatatatcccaatgctctgtataatttcaaggcacaatgttttccataaacctagtaaatagaatttaagccatttcgaacaaaaacaacacacacacacacacacacacacacacacacacactattctgagcactttgatttgctgcttttgttaaagagtctgacatgccccaaatatataagccaacattatcaagagctttaaaaatgcagttctcacatcttaatgatttgaaactatatataaacattatcaactaaaaaagtcttaaaatatctatacaacaaaatgtctcaaagaaattacatttctaaacagctatttgtttcatggttgtagtttgtttcctccagttgttcattcagaaaacacacttttacttttgaacttggatgtaatcaaaaggaaccaaacttgtggaccaaactccaggcataacaagaatgtagtaatcagtgctaaggcttgagggaagtggtggcctagtaatctaggaatagtaatgaggattaaggaggacagtactccacctctgagtcctgaagtgcaggggaggagggtagaatatacagccactttgtgagagggtggaaggggtttggtattctcagaaaaatctagtgtttcagtatgcaagaagaaaggtgagaatttcattgaagcatctgaggctagaagggaatttgccagttctggagcatagttttgggtgagctttgggaagtttttggaagttggggggcagagaaatgggcttaatcgagggccaagaaccaacaagggcagcacattgtgggtctgatgatttggtgcaagatggataactggacaggatatgccagaattatactttggatagtgactaaattcatgatcagggcaggtatggctctcagacttgtggactcagatatctaaattttcactcagaaatgttaatgttcacagacaatttacatcctctgaccagtgttttctcttcctagagttgaattgcctgagaagcccagttatactgaggttacttggtaagcctaactagagcatatattctttagatgtttagggcatcaaggcatcgagctaaaacagcctgatgcaaatgtcaacacaatagggattccactgccctcaaattaggataaataagtgtccttggctaggacctcctccccaactgtcataacttgctctaacattcttgacctgaccatccttggtctgagtttccatttctgggtggcctcccactcagtccacctgtgttctcagatatagtaaatttaatcaggataaaattgaggcctggtttcacggaagccatttcatgactttaagcctgagctcctctgggatctgtagctcagtagcccccaagaaatgaccattttagtatatatctcagtccttattggattgctatgtccttctgcaatgggaaacctgcaaatgttttttcacaaagttaactttgaaaggcattttttaacatataatttaaagtggtttggccaataacaaagaaaagtgaatattttttcctatggtagatcagcatttatgctagcaaatgctttttatggtgacgttgttaatgtttaacttaataaaacacagagtgaatgtactaattatcctgcatttctgcagagttattgatgcattatcaatgtttgatagcgttacataatgttcctgtaaaatatatttcacatgattttcaaaaaaacaaaaaacaaaaaaaacctctgccttaatctttctttcacatcttctgaggttgaaagctgtgtgtgtcatagattagaaaactccctcccaaaagtatgtctttaaaaatttcatttactaatgaaaataaatgtctgtttagctaaaaaaaaaaatagtttttaagtattcataaaatggagactaaaatcaagctccatttgtcctctagaaagtcagtattccagaaagaccatgttattagtctatagactttaaacgaacaagcgatcagtgctttgtcaggcagtacacatccaaattcacttctgcagattggctgttcgtgtaatgtcaaaattattctacaaatcttgcaccactggattttttcctatttacttttctattatttaaagagcaccagggaagttgaaggtttcctgttgtttgaaataatctctgagctatcctcacacccctagccactcactcattccctacagctggcacataggcctttgttattgatttttgatttttaatgaaatatagctatagaagcatgagaaacaaccaacaggcagaccagggaaacttatctgtaagatggttttaataaagtgtccacattgtcttctatatgtagaaaaattaagagtaagcctaacattccatcaacagtgataggcaactattaatgcttatgtgtctaagtagattgtcagtgctatattctaatattgaagctggttgttttctgcagcttaacatacttccgagctgttcatcttagccatgaattgatacgtactcaggaaacatagctaattgtaatgttatcctaagaaaaccattatcatcttcattatactcatgattatcatcatgattataatcatcaggaaaataataccactggaataggctcattttagttcattccaaaatcacctagaaattatatgtgtgttatctgttgttttggattctctacaaggctattctccaatgacatggataatcatatttttaatttcacttggattttagagccaatgacttacaaatagcattttgcagaagagcttggagtaggatgcagaacttttgacttagtcccatctctgttctaattcatctaaatttagttacttagcttctcagaacctgttttctcatcagtaacatttgaaagtaagattaaccagcctgggcaacatggtgaaatcctgtctctacaaaaagcacgaaaattagctgggtgtggtggcatgcgcctgtagtcccagctattcaggaggctaaagtgataggatagcttgagccccagagtccaaggttgcagtgagccaagatcatgccactgcactccagcctggataacagagtgagactctgtctcaaaaaaaaaaagtaaaaagaaagtaagattatgatgttgtctttccaactttcgatgtctataacaaagtatatagctttagttcagaaatcatgattgagggaaaattgttgaccatcaccttatggcagcagttctcaattttgcctctaccaaccttcctcctcctcatttccctcccacctcccattcaggggacattggcattatctggagacatttttgattgtctggggaaggggcaggggtaagtactgctggcatctagtgggtggaggccagatatacggctatacatcctacaatgcacaggacaacattatccagccagaatgtcaatcgtgttgtgtttaaaatcctgctttttggtgctagggattaggggaaagtacatattagatgaggtctagaagttaggaggtattgtggagtccagagttggcctgcctaatcattcttgaattctcccgttccccaaaaggagacaaaatcccagaatgaagatcaccagctcagtcatttcatcttgctgcttcaaacacacttttttttttttttttttttctgagacggagtctcactctgtcgcccagcctggagtgcagtgacaccatgtcagctcacggcaacctctgcttccctggttctagtgattctcctgcctcagcctcctgagtagctgggattacaggcatgcgccaccatgcctggctaatttttgtatttttagtagatacatggttttaccatgttggtcaggctggtctcaaactcctgaccttgtgatctgcccacgttggcctcccaaagtgctgggattacaggcgtgagctaccacactcggccccacttaaaaaaaaaaaaaaaagatagttgtcccaaaatagaaatgtgaggtttcacaaataagaggcaatatctgtctctacaaaggctcattagaatgatgaaaattcatctggctaaagaagttgtttttcttttagttataggttattgaggaaagtctcacagacataattggatcgcttatcttattcagtattcctaactagtatttgcataacttgggtccctgcttttcttctgttcaaagccatgtcatccttttgttcattctagctacttcttacaaattttgattaaattactgagccaaacactgactgtttgaaagattgtttaatgatgatttttaaggaggcaacagcaaccatttcaaagcttctttatatctgggcacttcctctttatacatttttgtaagccttggctcatagaaatatatttaaaaacaactggctaaattctattaaaacactcaatggcaatttttaaaactgttgcgttgctcatggaacaaaatgtttggcatgccattaaaactgaagtgttcatgaaaactttcatagctcaaggagacggggaacctgaagaggttcttaaatggcaacttagtacccagatacactgtgtcacattcttctgggaaggacaggaatgtgcaatactgttaggtggctccaagtaacagaccctccttggaacaggaatagacctgattgtattggtgtgctgtcttacctactgaaataaagttattggtcttgcaacaaggacagtgaggatatttgtttaaaaagacagcttgaaaaaatagcaaagacaacaggaaatgataaacgagcaagactttgccacaataattactgtagtattgaaacaaatgaataactttcacagcaatgttattttctgtcttagattacactactacctattcatacagtatgtgcaccattgctcttttactgggaaaaatatctaagaaggaggagttggttaataagttgtctgataaatttgtgttaatgtttcagaaaacttacaatgtcttgtgaaaacagactatctctgaaagatggaacagttgttttgttttttatcttcactagttttatgctaaaagtcattaaaagaaaaactgaggtaaatccctctgatacagactggtgaaataatatacaattatttataacctattttgtgaatgttattccatatgtgatttgttagttcctactgaaatgttttggttttgtgaaaaatacttgggacaaattatcaaaaaaactaaattctatacctagctcctaaatttataaatgttatataacttctctgagaatctgtaaaatattgtatctacatctcttttttttcctttttcctatgtttcagatattaaagccctttgtgagatataactcactatggaattgtaagagattattattgacaaagatttaggatatggatatgcctcattctaagtgtttttcatattgtcatcaaattcatattttctagatagaagtaattgtttcatttggatagcataatttgatctaatcttaacaaaattcagactgaagatttttaaattctacatttttattttcccatttttgtgtatcagtatattaactgggtaatatttttaaaaattagatgataaggatgatggactcttttttgatatatgttaatatatatataaagcttcaaatttatgctccacgtagttctgttccccactgattggcttaaatctcattcaaactccatttcccaaaaggataagggctctttggagcaactgttcatattattacaatgagtttttttcccctcccctaatgggtttctaactaatggacgagtttattgggctcaacatgtttgtttagaatgtttcagaatgtgtgcacaaagtatactatgttagtctaagatgatattatttagccttagaaaagaaatctattatataatttgaatgtaatagtaatgcccattaaatttatgagtttaaaatgttaagagcatgttaccccatcgttcctacatttcattccctcatttcagggatttcattggagatttttttctcaatgaatnnnnnnnnnnnnnnnnnnnnctcaatgaatagaaacataaacttttctagtatcatcaaaggaaggattttacgttgtagctcttgttctctctctgggtaaacagaaagtaaggaagtcaccaatgtagttactggggttcaggaagattaaattctaacccctcccatcatatatatgagactttatcctgtttttaaatttatttggagaaacttagattaactttggaaaaacagattttctaagttttcttgatcacctaatccaatagctaatatcccttgtataaaaaggaaattcatttttttaattaacaaaattttttcactggacttgatttccaacagtgccctttattactttaaaaagaaaaataaaagaaaaaaagaacttacgaagtttacctccatagcttatattacctttaattaacataatattttcagcagatggactactagggtttagcagaatacatacaaactattattcgactttggattacattttgagccttgaaatagcatagttcattcattgctgtatgtgacattttaaaaagctgaacaaacaatattattcttggaaaagaaaagttctttctcactggattcaccatttagaaacgatattgaattgatttgaatcagaaaattgtctctaaaaacttgaaatgaatataaacattaggcagatgatctcacctcttatttcctgctttagtcctgttctgtttcctttgagtggttcttaatattcattcaaacattgtatgtgttcagatgtatcccagagccacagtttgctgtcacttttgtcagagcccaggtttactgggctctgtacttcagagctgtgcaaggctcctatgccctggggtagacccctcttaataagaggcatgttataatcattctaccaggcactgtcatcttatatatcaagagcacttgcatattttaccactatttcttcacctgtagaaagcatatggtgcttttaggtgactaaagttctcctgccttagccttcaggcaaaattcttacattccttggagtaacaaaggttcatatccctttttgccccaggagaaaaaaaaaaaaaaggctaagatgcatcattaatcatggaaactgtctactgcaacagtgccaagaaaatgatcatccttgtactacccatcaatattcctgacacctgtctaaaaactcaggtcatgcatatccatctgcctttagagaagtgtcaatgtgcaaacatccttccactatttttagggtcatgttaaaattattcaccacctgcctgtcagttcatccaatttgtaatattatcctgatctaccattgtctattattggtcattcctcttttgcattgtgtttttaaagcattagagtgtaggatgtttttgaaactgtcaaataggagacagtagaatcctactggaggccagagttcccaccaataaattgctacactcggtgtcccctcatgcttcatagaatatgcagacatttcggactcccatttctactgcaagctccacctcaatcttatttctggtaaatgaattattgtttctaatgacttttattataaaatccaccatatttctatcttgggaaattgttctaagaggttaaaacacaccttacaaataaacaaaacttttaaaattaaggagtcaaagaagagctgttctgataaaactgtacatactcaaatgcctagtaatattatattacattcaaaatttaaaatgaaatggaaattttgatagaaaaatatgatgtagcatgagaaactcaagcaatatcttggtatgtctcatctattattcttagtataaaactcataacttctaaaactagctagtcagtcaaattgttcactggtgtcaagtcactttttaacatttgtattttacatctaatgtaattttgaaactagtgtaactttctccatgctctttgacttttttttttttttttgcctgttttcattgtcttgtgctaacacctgtgaaacaggttataatatcttagaagtgaggcatttccatgtagatgggaaaatctcagaactgagatttaatgcacccttggttctagttgttgctatacactaatcctcaggaggaagacctgtattaggtattacatttgaccataacctccgtgagtctttgttttcttatctgtaaattacagatcttagatagataatctctaatgtctgtttcatataatagcctacctttctattaatttgtacaataatgacacataaagccatggactgaagtgctcagtccttggtaaataatgacttttcccagaatttgcataaatatggatatggtagaatcctgaaaatgggtagcaaattcagagtgtctcttcagaattgttgttgctgtagtcaacgttgctggcccaaaccatcaaaatgataaattgtaagcctagaaaagtaccagtgattttcagacagtatcaagtgacttgagtttaactgtgacattcataaagtcacgtgtcctggttcttaggcttgctggtatccaggacttcaaagcggcagatataacaaagcaacctaagacctacgaaatctattcatgtggaagatgaaggggcttagggagcttatgatttaattagctagttgggatcagaattttaattagtaatttccttatgaggattgataaatgtattaccgatgctggtaatatttgttatgactttttggaaataaggaaattcaggggcaaactgcacccaagcttctctaactttatattcagaaacccatgttactcaaacaaatacacatatgccaaattataattattcaaataacttttatggcaaatagaaaataaagcattaagaatgctaaagtagaaataatagaaacacatttaattttgcatttactttgtgtcatgcattatatatacaacacgctatctcatctcttcacaacctgcctggggatcaggtataatgaggaaagcatagctcagaaatgttgatgcaatagaacagggattccagctgatgtgtgtaactataactggcaacaagggaagtcaagagtgtttcagaaaatggtagtgtttgcattgagtgtgcctggcagagaagagaaaaaaatgttatagacatagggaacaacatttaaaaggcaaagaggcttcagtgagtgggaatgcccagggaatgacaaatagtttcatggctaaagcatggaatgaaaaagtggagcaactggagctaagtgagagtagtagtttgttgcttcaattaagtctctttcctcatttgcaatagaagttaaaatttatcttctgctcaataggggagtcactaaggtattttaaatcatgtcgtattttttattaaataaaaaaaaaaaccctggcagcagagtgaagaacaggctagagagggagggcattaggcaagattaattagaagactacggtcataacaatgaagaatgagtgttgtggatgatggtagcaacagagagaaatacatannnnnnnnnnnnnnnnnnnnnnnnnnnnnnnnnnnnnnnnnnnnnnnnnnnnnnnnnnnnnnnnnnnnnnnnnnnnnnnaaaaggttaccagatttgctaactgaccaggcaaagagaagtggaaagtcaggaaaaatacgaaggttcctggttcatctggctgcctagatgaatgacagttccattccctaagatagatagggaaaaaagtatcaggaagagtaggactcggggccaaataatgaatatgttcatttctatgttgatgtcttcatcaacatagatgactggaggtctggagagaagagggcatggaaatgattatgtggtaaccctcaagtagaggcagacgctgggggtggcagtgaattcaagtggaggaaaaagcaaagatgaccaaataaatacctgggtaaccatgggacaaataacaagaagccctggaagcagatggaaattgtgaaaacactcattagcttctttctcctttgttttcttcctttcttcttgcttcatgtttttctttaatgccagatgaataatgatttcactgtgagagttgtattttaaaatgttgttcctgttgcaacacttatttttctgtacactggggcctaacacaatatgccctggttgttttctgtgctcacaaagatgtgcttcctcatcgtctcctggcctgcccttcacaccttccagggtagggctgctgggccactctctttcctgtccatgtcactccatgcattctctctgccaatagtgtattatttccttcactgtgtttaatgtgagcagatttatttatgtatttatgcttttacctttttattttatgtcatcttttctcataatagaaactccatgagggcagggaatttgtcttgctcctccctgtaaatgcagtgcctaaaagaatgcctgacaaatagtagactctcagtaattatttgttgagtaaacgaataagactgagagctacctctctagaaaccaaactacataaaattttaaaggaagctccataccaaattaatatctctttgctttcttctcaagaaattctaaccatactaatattatttaaccaacttataatgcaaagccacatacaggtgctaaaacatatagatagatagatagatcgatagatagatagagatatatatagatatatattaatcataaattaaaaattttcactcctgacaaaatggatcctagttagagggtttaattttttttttttatctctactgggcatttaaaaaacattttaaggaagaacttgtatagaaaatataattccaaacattgctttggaagtaatagcacagcctgtttactgagaggggaaaaaagagaccttcatatgcaaatgtatggcatttgaaaatgtcatatagctacatctacatataaataagctgctctctgaattccagggaaggggagagtttgtatagcattagccaatttctctatcaaagtaaagtaaactaatagaatagcagtgactcaagatatagaaaagcacatctttactacctcttaatacagttgtggcactccaggtcaaagaccacctggccaaaatccaaacctaaatgaaatcaaatcccacagtgtttgaatggcaatagaaatgaatcagctggaagaaaagggattcacagatcaaaaaactgagaacttcctatcaagtatttgcttcctttctaaacagtgacatgaaaaccaaaggcttcgtgaggtctcctacacttagcctctatgccagaattgtttttcaggtggggtcctaaaggttaagccaaaagaagaaaagatttaatttttacctctttcctatttcatatttgtttcattgcccatatacaagacggtcactttgggaacatttctccggtaaatcctaatatgtaaactaccatatagggataaataactccttgtattaaatgaatttttcctccagaagaccagagtaccattcaattaaactatatttttcctacattgtatggttctcccagctcctggaggagttaattggcctcacttgaataggcagcccattcctggagacgaggtgccctggtattatttttacaataggccatttgctgctttccaagttgaggctacggaattcaccataagaagaaaaaaatcttaataaattattttatgtaatttttactgaccatttcatgcagtccatgtgggagttatgtttccctaccaggaagagctgactgcaatctaccaggggtgcctgcaccacaatttcattttaggtgctaaaaagcataccaaagcctgccctggcccttatatagcatatttataagggagctcaggctgagaaaataagcttctagaatgataactgaagggcaatacttgtattttagagaaaaagacattttagtaagcttaaggtatcaatggggaagaaaaaggaaaattcaatagtcaaaggaaagcaagaaatcagggtggtcttcagatagatcaatataattgcttttttttttttaatagggctgaatgcttggcaattttattagtgcttctctttgaaatgacttttcaatgaaagaattattatcaccattacaaagataaagaaatttaggctcagaaagattaagcaatttttccaaggccacccacctatttaagaagctgagagtatgtataaactgagatccctttgaccacaaagctggccgatcgctttccattataccggcctgcctctcgataaattgagtaacagggaaaaggtagcaagatgcatactggctacatccgaaactatacagtctcttgtggcagatattaaaggaacccaaacaaatccctaatgaggattaaaaatatcgtatcaaaagaacatgttcaggaaactaaaaaaggaaaaaagaagtagagaaaattttgttgagtttctgctaaaagtgctgacatgtggggatatttatgtttttctgaacatctggtggatattagtatgtttttattcacaatcttctgttattaatgataaaagctgagtaattatgatatactgccacaatgaatgaataccatgcattttttccagtgtattacagaatctcatcattccatcaaaaataaaaacatagttatttttgaaaagaggaatatggatattatcttattataacaaacttgtttccatcagaatagatcacattgagtcagcaactctgtttctaagagatgagatacacttcaagtcataagatttgttgttattaataagtaattcaaattacaattttaatattgcctttagtttgagaaatgacctaaacctaatatatatttattttgtcaagacaaaaaatccatttctaagatttcatggaaggagagattattttattagcaatagacacaccatggcttttgtttcctttgtaaattgtcaaaatgaagtgtatctttactgaccctgtaatcttctccctggcttctgtctagagctccttcaactatgcaagcctttaaaaaaaattcattactgaatacaattgactgtcttccacaaaatgccagcaatgacacacgctcagaggctaaaacaagcctggcagtgggactgcccataggtgagagcatagcaggtgatggttagtgggtgccgcctttgcagcgggactgtacaatagctcctatggcatggaccacactcctcaatccatgccctctagcctgctccaggcacaactagttcccccacaagccatgctctctctcccgtctaagttttttgtgtctattggtccagcatggaatactcttctgcttttgtctttggctaattcatgttcatatttcatgtatcggcttcagatagccttcctctgagaatgaaaataatataacagccactttcatttattgagcacttactatgtgccaggaacttggctaaacaaagacttcacatttaaaactcttttactcatgacacacattagtttaaaatagctatagtttattgagtacttactgtgtgccagacaggcataaaggttaataagttgcccgtggtcacagataggaaaaaaggaaaacaaacgaaaataggatttgaaccaagacattcaaactcccaagcctgtgatcttattacttcataagtgtgtataggtatctgttatttcacccgttttaaatggaggtcttcactccccaccttccacccggagtctgggcctaagtcctgttgtgtccaacatgggcctcctatctcttcccagtcatcacattgcattgtatttgcctgtttgcttttcagactctttctttctagataaggaaacaaaagccttgaggaatgaaggaaattgccaaaagaccattaacaataataaatgactaagccctctgttccacagtctgcacttttctttctgcggaatgacccttgtaattgtaagccagggcatttctccacagatggatatcccataaaaacaaagccaaagtgacctgaaaggcacagagaaaatgtatgtctatgtccatttcttccttctcaatggttcctttttattcgtttgaaaataagagtgtgaagatgtgattctaatgactaataacaactaaaacatttattaagtgctgattatttgccagctcttttgctgagggttttatatggatcctctcatgtattcctcataataaacctgtaaggcaaatactatgattatccccatttcacagataaggaaatatctacagaggagtatttgacttgatttgggccccataactaataggcagaggcactggcttttaaactcaatttgacacaattactctttatttgtataagaagtgagattattttcagtattgcaaaaattcactgtcaattaccaaactatttgacttagataacatatcaattatgtgttgtgagacaaacagcaaacataccttatgttcagaatcctttagaaaacactgagaaatatttagagaataagagagaaatgaatatgcctaaagctctccatgctcatattttgctcctggtttctttggaatgtcctagcttgaagagatgataaagggcttgtatgggtccaattctgtgttgtagaaaggcagatgggatcctgaggctctgtaaaactgttcctctgctaggcatacttcatattctctatattaaactcatctttaattggcatggaagattcattgttccaaatctcagatgaagatccctatattggatgcaattaagcctggcagcgccctcaaaagacagtcttgtcactgctagccacagccaggacacagtaacagttccttctagtgacccaagaccaataaaaaaataaaaatactaaagaagttctgacctccaaaggcaattagcccattcctggtattgccaattatgatagaaaaaaattgccaagctcctgggacatggaaatacactcagtaacatttgagaactggagaaactattttccaaaatagtatgaagacatgaaggtgatttgtagatatttgagtttggagaaagttgagggaaatcagattacacatgtttactacaagagattgttaataagtaaagaaaggctctgatataacaaatctaaacagacgaagtgagaataaaatcttaaattcaaaaacttgaccatccctttttaggcaaaaaaaaaaaaaaagaagaagaaaaagaaaaaaatcacctgatgaccttcatttttcaattattagagttatctctactacctagaaataatcactgtcaaattttggtgaatttccttctagttttttatatttcctatatatttttttaattagcatccttctcattttctatgtcatcaaaattcttcatgatttttttctatttaaataacattttatcattttgttgtaacattatttaaccattacactgttgtggaaaatttaggtaatttcccattttttaccattttggatgatgttataattaattaatctctttgtaacctgagtctttgtgcttgaggctcttgatatatgagctactacattcctctttgaaagtctctaccatattctttccaattgatggtatcttaaattttctctgcaccattaaccactggccaactaacataataannnnnnnnnnnnnnnnnnnnnnnnnnnnnnnnnnnnnnnnnnnnnnnnnnnnnnnnnnnnnnnnnnnnnnnnnnnnaacttccctgatattttagagcagcttttatagacatggctggaaattaagcttacaattaaaaaaaataaagaaacataaaaaagaatgccatttgcataaactaagcaaacagatccaaaatatatacatagtaaaaagaccagatgtaaataaataaaattttgattttggccttctttaggttgtgaactttcagtacttttgttcttttcctatctatattttctactattctcaaatcaatgtgaattgcttttatagcaaaaaagccaatatactttatttttaagaaaaagatatatagaaccaagcaatttagtcctccaaaaaaaaaccacattcttcatattgaatgatatacagtatcctattacagtagtatgcgaaacacctatagttatgactgtacctacagactcaactgaaagaagaaggcaatcataggaatctctccaggccacacacacacacaaaaaaaattctgtctcaattatctatagctttcacacaaaattgttttctgatctggaattatccagatgactgactctttcatttttcttctaactctacatgtaaaactctaagacaattatttaccactgaaaaattgtgaagaaaacaccagattaaaaatgagaacacacagaaaaattgggcatgagtatgtaataattctccgtactttctgggtattagtccattctcattctgctaataagacatatccaagattggataatttataaaggaaaggggtttaattgactcacagatctgagcgctggggaggcctcaggaaacttacaatcatggtggaagggaaagtagacacatccttcttcacatggtgacagcaaggagaagtgcagagtgaaggtggggaaaaacaccttataaaaccatcagatcttttgaaaactcactaactatcatgagaacagcatagaggtaactgcccccatgattcaattacctcccaccggatccctcctgtgacatgtggggattatgggaactacagttcaaaatgagatttgagtggggacactgccaaaccatgtcactatctttgttaacttttctctaaacctaaatctattttaaagtagatttttaggagacacacatggctttggagttctctgcctttagccctctcatgacattagagattcactgaatatttctgacctcaagctcctactttatcaaagaaaaaaccgtatctatacacaaacacataaatatatatgtatgcatgtataggtatatatatgcatatgtgtatatatgcatgtgcgtgtatgtgtatatacacacacatatatataaatatgtattcatgttcttaaacttacatacctgttaggagtgttgcagtctcaaacaaaataagagctacaaaaacaaaattttaagtcactatatgattataaaataataatattatttaataatcttttggcaagtagaaaacctacgttatataatggacattgaagagaccaaatctatgaactttttatcttaaaagaactcttattttcttgtgataaatttttcaaaaagaaagcaaagttttgcttaaaagcatttctcactgatgtttctgcatagtctaattttttcctttcacttcatgatttacttatcttgcctttaaatttacatccccaaattcttcgtagacaattacaaatgtccttcctcctactttagatatcacgtagctgtaagttttcatttcttaatcatacattatcttactattatttagtagctagttcaccccttaataattttccactgaactacggattctttccagttaacatcaattctactgtagacatacccaaatataaacatagaattttcaatgtaatctcaaaaatcctaataagggatatctgtcatgtttatacattggagcttaaatgtttcttctaatttttcccattgtacaaaatagcactaccaagatgttttagccaaaaactgcatcatcttggaatagttcctaccattttgcaatacataaacaggtcatattcaatccacctgtaaggtacaagggaaataaaagtaattttttcccttcttccattgctactacccaagttgaagactgggacattgtctttctcccacaccactgtactggtctcctgtttgctctccctgcttcctctgtgtccccttaatgatccatttttagtaacagacagatgtgctggaaactacccaaatgctttcccattgatctttaaactaggtcaggcacagtggttcatgcctgtaatcccaaccctttgggaggccgaggtgggcagatcacctgaggtcaggagttcaagaccagcatggacaacatggtgaaactccatctctacaaaaatccaaaaaaaaaaaaaaaaaaaaaaaaaaagctgggcatgatggtgggtgcctgtaatcccagctattcgggaggctgaggcaggagaatcacttgaatccgggaggcggaggttgcagtgagccaagattgcaccactgcactccagcctgggcaacagagtgagactcggtctaaaaaaaaaaaaaacaaaaaaacactaacgcaatacttcttagcttggtgtatagtaaggatcttactgacctctccaacttcattttatccctctctccaccatagctggcacattctccattctagccacaaggctgtttcctggaacacctctttcctgcatttgtctttctctctgtgttcactcagtcagaagctcttccggggctatctctgaccagctctttctcatccttcctttcctcaatatgacttttatcacctctctagtatcccacgctactattctgtatctgagcaccctattttttcctgtgacatttctaatttagatgttgatttttgtttttatctattgcctatctcactctctaatatgcatgctcttccagagagaaactgtctatttaactcaccactgtacatactatacctgtagtatttaacacatagaaggaaaccatcaatattttaaatgaatgaatattattgatgaattaattaggtgtgagtaggatcaagctctagtaaatttagaaacctcatgagagaaaacatgtttgttaccttctctggatccagggggctatatagtcacacatcaagaaacaaaagttgtgggttgctattgacaacatcaatcaaagcaaaagtgaggggctctgtttgatttatcaatgtcatatttcgctcccaactctgaacatacctattttgtgctttttctatttcaaaataaatggctccctataagcccaattctaaatgttagccattttacttctaggaacaagatagaagtttgactctctccaaattcaaatttgtacatgttttataacccctattgatttcttgagtggttaaccatgtacttagaaaggagtgtaattatatacctggagggtgttaaacctgttaaaaggtaaactaacactataagatcacaaggtaccatttagttaataactaatctccagccctaaatgatgtccatgtagaagtaaactgtttagactcacattggatccttaactgtttctaaagtagttttttgcactccagttatcactgactagaaattaaggaagtgccagaagcaagtcagttgttcaaaactgggaagaaaaaaaaatgaatcttagctacacatcagctcttaaaaacataattttggggatgcaaatgcaatgaatcacgggtacttcaacttaagcttaagctaaggtgatcatacaattcatcattcaaagtaggaaacttttgagagtaaaacagtacacgattaataatttatgctgggaaaatagacataaataaaggaagactttccaggtcacatcctagccgaaaccaatctttcagctcactttcattgactccatttggactattaaaagatacactctatcaatatgagtttgattggtaaatggttaccaaccatgtacaaaccctactttttctagggctgccataacaaaattaccatgaatgaggagacttaaaactacagaaatttattatctcacatttctagaggctaaaagactgaaattcaggcattagaaaggccacactttctctcaagtttcaaaaggagaatttttcctgggctgttccagcttttggtggctcctgcatgttttggttttagtggcacatctccaatgtctgctgccattttcatatgaccttctgcttgtgcgtcttcccttgcccttcctcttgaggacaccagtcatggatttgggacccaccctcatccagtatgacctcattttaagtaattacttatttccaaataagattacattctgaggttccaggtgaatgtgaatttggggtaaacatggatctaccaaagacagtaaccaataaactattggttccattattttaccaatcactagatataatattttgctgatagaaaaaaaaagtaatgctgggcatgaaaaaaacttgctcattggtattactgtgtctctttaacaggttaaatagagggacaacacggaaatctaccatggatcttcacatcttaaaagttttattttaggcagcattatcacattcaatgacagtcttactgtgcttaaacacaaagatatttgattcactgacatgtaccaatagatgattgagaaataccaaaagttgttaaattcttcagggcttatactggctttggaagttattttttagcaaaacctataaaattctgtgattttcttagagtgattccatgacttttttattgccagttttatttagaatgctcatttaacatgtcaaacccaccttcagaaatactcatagcacaatcagctacatttgtttctttaaataattttatcttattcctgactatgagaagagatggtatgccttctggctctttcaatgagaattgcttacactaatttggtcaggtactgtcaaatggcagtactccagatttataaattaattcagatctacacaataaattctctcattgccatttctgggccatgacatcattcaggagacatacacaaacccatcaacatttgcttatgcttgacctttcacaccattcatggatatccttcttgtctttcatgattagcaacacatttttgctctgcatatttttaccttttgctgaaggagactgaaatacataggaaatatggctcttacctatgcacctagtctttttgtactggaatgtatactttctattgagtagacttctctgccatattgcaccttaccttgtcacctaaggtagggattgattgtacctttatggacatttcactgaagtggtgatgagctggctctgatgcaaacaaccaggggcattaattttttcaaagccaccacactgaggtagaagtagctgccaaacatatctcctatgcctataatattcatttatttattcattctatatattgaacactttgtgtcagtctctgtcctaaacgttagctctctctctctatatatatatacacacacacacacatagatacacacacacatacacaaacatacatacatatatacacaaacatatatatatatataaacctggaaacaatacacagtctctgcccaaagagagggtataatctagtgcaaaactttcttatgtgccctgaataggtaacaggtgtgttagtgcagtgatccaccttagccttctgggtggcttgggtggctagagccccaaggcttataatgtcctctttttaccaaaaactcaatttatttttttctgtatgtatggtgatgttaaaaatttggagatgccataatctaatgcagtgtttcccagaatgaagtctgatggaatagtcccacaaaatgttcctccaaagagcagggaggttccattgagaaatgagtctagaagcactacataatgcttgtcccctcctggcatctcacagtgtaagttagccttttaagggctctgaggaaagcagcagtaaagaaaccaatataatttggtttaatccactctatcccaaatttatttgactacagaacccctttttcccgtgaattctgctacagaagtagtcaggcatcaacagagctcccctcaggaaactctggtctaaagagcatgttctatgtccgtaaggcctgcaatttagaagcacaggtggccatttgtcctgccccatgaaaccaaagagatatttctcaacttctgcctcttctattctgctgtcaatacccactctttgttttaatatcatttatctcagttgccacagtgacacaaatagtaattttgcctccaattgttttcctctatttgtcttctttcctgccgctgttacctttcttgtgacttcatctttcccacggactagctgagctgatatagatatcaccagtggcccaatgctcctttactctcatctgtaaattgaagcaatcataaacattggtataatctgcaccttttctcagctgtgttatctgttcctgtatttgcaaggatgcttcatttgctttcacacagggtgttcttgttgtcaattctgttagttatacaacagagtcattaaagaagcctggagatttgaaaaaattggtctccaaatatctgagaattgacaaaatctagaaatctctcacagatgttggcacttgttacaggcacacaggccatacatggagtggagtgttctcaaaagagacaaagacattctaaaacagagtgagttttccaggctgactacgaagggtaaggaaggcttggcaagctgaggtcccctgaggacttcccgtaacatccaagagtggatgcgggaagagcagcagagggcaaaccatggctcacacactcatagaccacagcggagactggcactttacagagaggagctaagatagacctgggaccagaaaggtgggccactgtaggacagttatcaggggaaggaagggggatccagggtgcaggaaagcctagcatcagatagccaaagcctgcgagaggtaagaaaaaatggtgacgtgaggtcaggaacaccaggctgcacactatttgcacgtcagaatcacctaaagcaccttttaaaagacagatccaggcccctcagctggtaattctgattgagctgatcaagaccaaagcctggaaatctatttttcacaagggaaggaggtcaatctgcactagaacaagaagcattgcccttaaaatgggaattttagtgtactataattctattttatccttaaaattagctatttgtaagagatcatagtagaattgtgtttatacaaaactcacagatatatatatatctatatacatacttctgtgaggggtgtcagagcatcaacagcatcctctaagatcctgtgatgtccaaatacagtactaaggtgctgtacctataatacctataaattctgctcaggtatctagcattgcataatatccccaactgtggctatctacaatttctaaactgggtagttcattagtgtttagaattaaacattaaacttaaatattccatttaaataatacaaaacatttctagctattagaagcacttttactaccaattttatggaacttttcagtttcctttttttttttctcagaagttcagttttaaaccagttttcatcgagaattttacatttcttctagtgtcttttctcaagcacttttgagactgtgctcaagaaagcctattgaagagtaaaagctatacctctgttccttagtttaataaattataaaaacccctccagttctttttaggatgctcttgtagaaaaccaaactgatcactagttttatttatcacagtatcatcaagtatatctgtgctgctaattgtggtgtttagcatctattaccataaaatacttttaagtatgagaataaatgcatggttttattctgaagctgacaagtaaggaaaatgttttattaatttaaaatactagtttctattttgaaattcatttgcctgttttttgttttgttttgcttttttaaataaaagtttccttctgccctgaaaattttcaatattctcacttctggacaatgctatacacacagtgtgaatggccaaattagaatctgttaattcagaattgaccatacatagttccactgtgatttttgaggtatgacatgcatacaaatgacaaatttttccacctagaactaaagttcccatacttcaatctttaaatgaaaggggtaataaattcttcctttcaggatcacacacatccctggctaacagaagtgatattatttttaaaactcgatgatctgttcatttctccattagcctcaccagaagctgtggaaagaagaaaccacatccccttctctggctccacttctccaggatctgcagccactcccctctggcagatattctttcataaggcagtacttacagtcccctttgacatgccaccctcacctacaaaaagttgttcccatgaagcaaagttaagattccttttctactgcttttacttttgtatattttctggaaacttcccaatatcagtagagaaacctagggaaacattcctttattttaaaaactatgtattcatcatcttgtgctatgttctgtgctacgtacagagactacgcaagtttttttttttttcttaaatcaaatatattaccagcctttaaaagggagtttctgaactaacgtgtcacacagacaagtaaacaataatgaagatttggtgtggatggtgccagaataggagagtggttttaggtcagaggggcagtgagcccagactgaggagacagaagagaacattgcagaagtttcttagaggaaataatgccaaggatgagacctaagtgatgagcaggactttggtaaacgaaaaggaaggaaagtgagcattccaggcaaagggaatagcatatgggaagtcccagaggggagagaaaaatttcatatgatgaatgtaagaagatgcagaagaattgcaaaaggtgagaatggagaagctgggactagattctgaattgccttctgagtactgttagcatttggctcattaaaggaacagtgaggaataacttgagaattatttctttgggaagttttaagggcgatcaaaatgtactcacgttttctcttctagaaagatcactctggcctaggtggaaaatatatttcgagagggcaaaattggaggcatggtgatttgctgacatatggtctgactttagtgagtagcagtagaaatgtagagaaatagacaaatttgggagatacttaagaagtagaaatcttggtgatttactcagttagaatttaaaagtgaaacccagatttcctgtttggtcaatgagtagataaatatgcctgggataagaagcaggggaaggaagtgggagaaggatctgatgagtttgaggtacctgggagaccctaggaatgttgatatatagatatgaaactccataaaagtgtgatcacctcatcacctataaaaagttgatctgggctgactaatcaatatttggaagtcagaggcagtaaaatgacaaataaaggccttgggtgatgatgagctctctcagggaaaatgtttaaactgcaacaagagaagaaccttagggaagtatcaacatttaaggaatcagttggaaaatgggagcctacacagtagactatgaaggaccaaccaaaaagaacaagaactgggtggtatcatggaaacccagggaagagagggcttcaaaaaggaggatgtggtcagctgtagtgaatattactgagagattgtgatggctgaggcctgagaagagactactagttttaacaacagtgttgttggtaacattggtcataatagtttctctgaaggggtgaccagagagctgcaagaatgaggagaggtgagtgcagaagtgaagaaaaggagcagagacaacacttgtaagtttcactgtaaatggaataaaggaaacgaggtctaccaagggacatggattgagagggcctttttcatttttattttaagaaggaagacacttgagtgtgttgaaatgctgatggaaatgagcaaagagtgaggaagagttgaagatacaagaacaaagggagataattgacggagagcccttgaggatgatggaggggttgagattcatgagggattggccctagacaaggtacatgggttaaaaggcagaaagaaagaaagaaagaaagaaagaaagaaagaaagaaagaaagaaagaaagaaagagaaagaaagaaagaaaggaaggaaagaaagaaagaaagaaggaaagaaggaaaaggaaaagaaaagaaaagaaaggaggaaggaaggaaggaaggaaggaaagaaaagacagaaagagagaaagaaagagaaaggaaggaaattgttttttagagtagcaatagaatctaggtgggataaagagtcaggagtcatcaaacacaaatgataaataagatatgaaggccagatgttgtcgtgtatttttataagttcctaactatcatactgtacatatcacactggaaagagccctgacttcgacagcaattctgtttacaagttgtgtaaattactaagacaagtaatttaacctactttaatttcattttcctaatctataaaaaaatggaaattttataaatctaccttgaaaggctatactaaggaatacattttgaccatgttaagtattaacacaatgatggtcctgttgtaagattctcaagtaatttaagacataattactatcatcttgtcttaagaatcagttttcttgattgtctttagaagataataagcaaaatcactgagcgacaaccaatagctttagcgtatggatacacaacacatagcatagtgccagacacataatagctactcaagaaatattcatataataaattactgaaagacagctttggtgttctatctgtgttattcagacctttgctttcactatattccagtaaatgctctagcctcaatcctcttcactctctgccagttagtcacttcagggtcacagaagaaaacggttacatcacctgaggaggtttgtcttgactatccatttctgcacacgcagcctacaaagaagaaaactgcttggctcacatggcccagaagactagagtagatgggacctgacccgttgcttctttcttctgttacttagtgtcattttcagcattgtcaccaatgaagctcactaagaaaggatgcctggattaaccacaagcaaataattttggccaaaaatgcatagatttagttcaagacaaaaaggaagagaataaatatattcttagcataaaatggcttcccatggcattttctttctctaaagtttatagcaaactttgtctcctgagagcagcttgaaagcaaggagatgctgaggggaaaactcaatggggagagctgcaacaaattgccccagataagcttaaggcaactccagctctggactcccaagaggctaatgaaccatagattcctacctcttcccaaggcctgatacttacagaaatgttgtcaaagacttctaaagttccattaaatactgtatttttaaaaggtcttcaaaccaagacctgtaaactgataggagttacccacttgctgagagttaataggctctggactgagtggtgaagtttgaaaaggaccattagagacagaacacaacttctcccagcggcctgctctcttcactcttctgagggctctgccatcgaaagccaggcagggcattgccgagtcaaaagacagagcaaacaactaaggagctacttattttgcaattaataataaaattttttgaggtccaggatttctaactaaatctacatgagccttgttatgccaaattattggattataattgtatttggatgtcaagtgaaaatgttgcatacaagtttttctcccaagattttacagatttttcagtatttatctatgtaaatatattacaaatagaaactgagttaataaaagcccatgcaaataatcatccactattgttgcatttcaattactccagtccccaaattactatgtatatttcagatgctggtactttttccaatttaaattctagcaatccctgaatcatgtcatcaaggccttgcctgataatccagtaacatggaaattagttttcttacactttattttaattttatgttcaataagaatatttatagcatatgcaagcaacgataagaataatcacatttcacattttatattagtgcctatcaatggtggaatgaagaggaatttctgtttgtttgcatccatcctgttcccaacccataccactgcctcactagcaaagtttctgatccaagtagtttcaattatttttctgaaaaaaatagaataatgttcaacttgcagaagaaatgttaaatttgtagcaagaatgttgaaggacttggtctctgttttgaagtgttattttctaagtctttaacagagattaaataacaagaatgttatgactgggtctctgctctttacaaaacttgagaattgattgtatccttaaattctctgtgtccctcatgctaggctgtcacttttaactagcatttttatttgagtctgtgtcccagaagctttaaaaaggagagactcttctcatctactcgtatatgccttgcagaagctatgacagcaggtgaggttattgtggaatctgttaagttgcaggaactcagacttcattacattcagaacccattcaataggaatgcttttctagtctttaaaaaacttggattgcaactcaagctagatatgaggttttactgcctcatatgtttatacctgataagataaggagaggaaatcataagaactgtatatcttctttgaaaccaactctaaccaacaatgggaacaatcatgactttatttctgtatttataatttatttctgtcccaggcacaatgtaaatataaggagaacagaacagttttttccttttctagttaaataaaagtagtttcattttgctttggagaaatggcagtaagtcgggggagggtaaaattaagtaattacaaaaggtgtgtaagaatatgaatatttcaatactggagtttccctctactgtcattacatgtaaaaaatagcaagattacataaacacattcaaaattgaaaatttttgtttttctatagaagtatgacacattttgtggaccaacagcaaaagatagttgaaaagataataaaccaaactgtaatactcacatgtgcgtgtcaagatcatatgggatgttaaagcatgattttaaaaattgaacttaggtccactaaacaaaagaaaggcaatacattacatagtaaaggtcctctctgctagaatgtctgaattatagacacagtcaaaatttaagatattttataccctttcaaaaggtagcatgtcccataattaaggcaaaagtaatttattttgtttaatatatataaataatatctccatttctctacgtctttctcctagcatatcaaaaataatattctctagtaaatgttagtaaatattcatgattaatcataagtaaatattagcaatagaaataaatgttactttcagaattcaatgaacttagagctctgaagtaatctaaccgatatacattaacagtctacaacatccctgagaaatggccacacagctcctttcaataccaccagaagcccactattttacaatggaactcactcattctcctactgaacagctctagttgtttaaaaatatgcagtggagatctgcccacctaaaacatccactaaattcctgatgtttcctctagtttaggatcttttcaattttctcagaaacgcttacacagaatcagactcttctgtatgaatcaatggcctaagaatttgtatacatttgcaataaagtcctgattaaagtggggcattaccagagaaatatcatttgaccagcccccaaaggcctcgcagactgtagtgaacaacgggtagggtctagttctctggtctatacagcacaagtttgaccttaaaaaacttcagaattgagtgggatgaagatgacatgtgaccccctcaaaaaataaacagaaattcagaactagtcaattctctgaaatgaaatatgttaactgttaaatgggtaagatattcatgttgttttgtcaaagccattccaatgtgaaggctacatagaagtcgaattattttaagaatgactagacaacagagcatcagaacaagagaaatgggttaactgaataaatatttaatagcatcagaaactaataacctggtgcatctatctctgcacctgggactctgggttggctagttcaggctggttttttaagacacaccaacttgggctgggtgtagtgactcacgactgtaatcccagcactttgggaggctgaggcaggtggatcacttgaggccaggagttcaagaccagcctggccaacatggaaaacccccatctctgctaaaaaatacaaaaagttagctagtcccacatgcctatagtcccacctaagagggaggcagagacacgagaatcacttgagcccaggaggtggaggtggtagtgagccaaaatcacgccactgcattccatcctgggtaatagagtaagactctcaaactaaaaaacaaagacacaccagcttggagagcacttggatagataatacaacttaactttcaggacttctttggccaacctttaatctttgtccaaaggaaaacattctcttttttagaaatatggatagatttagtcaaattttacactgtaatatttctgctttgatccataatgtgttcctttgatagattaattatctaaacaacatcttattttcaactttttagggaaaggaatacaggggcaatggtaaacacatacacacacacacatgtacatactggactgtattgatttaagtctgaactgctaaatctggctttgccccctttctacccacttaaccttacttgacttgcagtaaggtaaggcctcaccatttgccattctctgtctctttagctttccctgtttctttccctgcaagcaccagggtagaaacaatatgagtagctgtactatagaacagcccacttcaatagctcttgactgaagtgttgactagcaatgggcatggagccctattagctctgctgcagataactcagattgtatcagaattgttttttcaaagggtcaggaactctctagaacaaaccatttgtaaacatttaaacaggaaactagttgaggattttaaacacagacatgaagagtttctaccatagccttttatctattttagaagaaagagcacaacccttacattaaacctctttttaaatggaggacagagaaatcaatgtctaaatcataagctactgaaggaaacatgcagacttccagaaatatataatttttatataatttaaaatgttttaatgctttgttattgcttaatacctactatacataaacattaagatcacaaacactatggttcatatacatgtttgtttggatattagatttctgtgtttctactcttaatatactaaaatcttgtttctaaaatatgtctattgcattactagcagtggttatatattcaggttttcaatcaactgatttacttggttggattgactataaatttgttgacatatattgatgattcctcattttcttgcccagagatcatttcttctactaatttattttcaatctctctgctttcttatttgacagtatcctatgagcagcataacagagcactccaagctcataaggaatagtgtaaactaattagcagattttacaatggaaactattccctacccatgtgatcaccctggctggataatgaactttgtgaaaatatccatctcttaccacactaaggcagcagcctcattcagacaagctcttatttttcccttatacttcagttcataattgtgaatatggcacgaatccagaaacaaactgtcagtatggggtgaggtacagtgttaaaaataaaatagactaaaaaccggattttcactttaaaaaattcttgacattcttttgtaactgacagaaagaaaaatagtcctaataagatgtgtttggaaaatactatatctgaaaagacagtgtataactgaaatttagggaagtcacagaaaatttccctgcatgcaggtgttcagaagcactgaggggttattaatgaaccatagaagtgtcgaatagtttgttatgggaagaaggtccagaaataaaagtgaaaatcagagctggttcattacaccagcagtgtgactggcaaaccccactgctaaagtctcctttaaacagcaggtgcatggtttgatcgctatagtgtgtagcccccagccctggcacagaatgaacacagcctcctccatgggttcatgaactgccctgcttccattttggttacacgttcccatgtgggaaatttcacccaacactacccactttaattttggtgtatttgcttactgcagctgcacttgctaccaaaaacattataccacaaaattccaaagtaacttcaaagaagagggaagaaaccaaaaaagttctatacattcttagttttctccatggaagtggtatgttcagttaaatagctgctatcgatgtgcaaatactgtaattcaaacaaaaaaatcaccaaccatcctagctaaagagacacagataagaaacaaactaatgatttaaatgtcatctacaggctctctagtatcttgatggtaaatcccttacaaatttgggtgtgtaacataaaatattgcccatcataatgatgcatataaatatctctacacaagaaagcactatacatcttttacaacttttttcagactttgttttgcagatggcatctggatcttaaagatgtatagatattttgcagctctgtttaatcataaataatagatttgtctgattcgctaataccagaggcatgtttttttcttccaatgaatatgcttatcatccgtgactgctaataataaaacctatacccttatatggaaataaaccatttcataaaaataggaattcatttgccattttccattactgctgactaattactagggtgttgaagagtaccttcagattgaagagtgtcttcagattgagttcataaaagctatatttctcatgtgtttgggcagaaattttcaagaatatcatatttcagatttagggaaaactcaaaagttttatcataaaatgaacatattaagactcaaaagacacttaaatatggcattacaaatatgaagcaaacgtttttggactaacaaaggtcaaaaaatttcaaatatctatgaaaacatggcaaaacaagtagaacatgttgtaatggcaggcaaaagtgttcactttagaatccacgtttattcgttatcgtaagtttaggtttcacatagcattgttaatacaggccaaatatgcatttaaatacacttacagtattcagtgtatactatgtgaatatctacataagtgattttgaaataacgttttcttatttaataggtttattgtggcaacaaaaaaatgtgtggatgctagtgaaaatcatgtttgcagtagattttaaaagcctgaaagaatacatttgttgaaatttgcattcggtttggaaaatgtgtgtttaacaattgaacacggccatattttaacttttaagctttcgtattgcgaaagtatcaaggtattacagcaatttactcttaaggacattatgctgggctttgaaatttaaaaaataggatatttcttcttggagtatttcatgatcaatgtacggtccctatgtgaggaaaattaaagctgtctgacaagtcctagaaacaccactagctgttaaagatgtaggaaattgcatgaaagcataaaaagcactgggtaattttgcaaatttcatctctaaacacaattgtaaagacgtctttcagttctttcttcctcttatttctgaagcatagccctttagttcttgcccttttaaatatctttgcctaccatagctttgcttcttaatgtactggttgatcttaccaggctaagtatttacagggggtgcttacttttatctgtattcacagagaatgctaacaaattagaagaaagtgccagagaacaccacataccttgtccggaacattacaatggcttctgcatgcatgggaagtgtgagcattctatcaatatgcaggagccatcttgcaggtaacatttttactcgcaagaatagttaatgtataaagttaatatgtagaaactaaattgtagatgtttatagaaaattggtcgacattcttcttgaatgggtaatcagcaacaaaacttttctctgctcctcctgtgcatgcatacacacatacacacatactcacacaagcattcacacactaaaaaaaaacaaaaatatgtgcaccttacacactcaagtactatataacacattactgaactgttctagaatttgaaattgtactttgtgcattataagctccttaaaggtacaagttcctccatattaccactctttctcctgaacacagaatagttgctcaataagtatttatcagacaaatgaatggatgaagccttatgtatattagattgcatagttgcttctcagagttcatcttttcctaagtccttcaggtcttctcataaatatcatcaatccttgttttgccaggcattcactattttctatagatctgctctcccatggagccgtgcaaagtgaaatcattagccatacccccccagtttcaaactcagtagagacacaaagaagttgtttatctggatttagtttataaatataaatactggccaggcatgatggctcacacctgtaatcccgcattttgggaagccaaggtgagaggatcacttgaagccagcctgggcaacaaagggagatcctatctctaaaaaaaaaaaaaaaaaaaaaaaaaaaaaaaaaaaaaattaagaattagccaggcacggtggcatgcaacctgtagtccaggagctacttgagagctgagatgggatgatcccttgagcccaggagttcaagcctgcagtgagctatggtcacaccactacactccagcctgggcaactgagcaagaccccgcctcttatatatatattaatatatatgtatttaaatacctactgtatgtctaaaatataattatttcagagatggcaaagccaaaatgaaaacataatttatttttatttttatttacattaagtacaagtgacatatgatgaaatagattgtattttcatttacaacagaagatttctctctctctctctctctctcccccactcttcctccctcccccctccccgccccccacctagagctgtcttcctttcatgttttccctccacaaaatatactagcacaggccttcaactgaagtaaggcagagtgaacaaaactgagaagttactcttgctaccccctcactccccagcagtgtcattattattaaacccttcctgatggagagaaaaaatttctcaggatgtagttatgagaaattcaaagtgaagtaatagaatagttccacaaaatcaatgatatgttgatcctctttaagtattgttttcttatgagctattttctcatttcattgacacatgctaattttcctatgtagattgtctacctgagctttccatgagggttgagtgagaggaggcaacattcattctcagatgaacaatacctcgtcttgttttgcagaactatgttgcctacgtcatacttacttttttctaacaaaatttgactctatcatcagcagatgatttttttgaccagaaaattaatgactcatcctgtaactctgatcctaatatttctcaacatttattctgacaatggcatagagaatgtttcatccaaaacagactaatttttgtacccatgtcatcagaaacacatattttttcaagtaaacatgttgacttaggttgattaaagagcaaattaaataaaatgtaaagctcaccttccagaaaatatagaaataacagtcattcctggacatgtattatctctctatattgtcaccaaaaacaaattatctagtaatcctcctacctttgaaattattatcataaatgtaaaaggaaaccacatatctgataaccgagaaacacaaagacatcttgttaaaaataagtagttgagagccatagccacaaagtaatatttatttagaaagggacacaaaaagccctaattttgtgatgaaaataaatgcccatcaatcaactataaaaatgaatgcaggccgggcgcggtggctcacgcctgtaatcccagcactttgggaggctgaggtgggcggatcacgaggtcaggaaatcgagaccatcctggctaacagggtgaaacccggtctctactaaaaatacaaaaaattagccgggcatagtggcgggcgcctgtagtcccagctactcgggaggctgaggcaggagaatggcgtgaacccggaggcggaacttgcagtgagccgagatgcgccactgcactccagcctgggcgacagagcgagactccgtctcaaaaaaaaaaaaaaaaaaaaaaaatgaatgcagcaccctacaggtaactgggcactataatttcttccaggtgtgatgctggttatactggacaacactgtgaaaaaaaggactacagtgttctatacgttgttcccggtcctgtacgatttcagtatgtcttaatcgcagctgtgattggaacaattcagattgctgtcatctgtgtggtggtcctctgcatcacaaggtcagtaacagcacttggtggctacccaaataaagggatatattgttactcttttatttaatcagatccctccgaggtgagttccttcatggactctgcagccatccattctctatgagtcctatgtccttagcataagagtatttgaatagccaatggagtggtacaatagcatattggggtggtacaaattattttccttaattttgcctgatgataaagattgttttttttacctgcttgaactagtatccttatctacctggattagtatccttatgtatctgaatcagttttaacatatcttggtataataacaaacacatttttatcttaggatgacaaaatagttttcagtcacaaaatgcaaaaatacaagtagttgtacttttatggtaaatgaaaaccttagatacagaaaaacatgcagcaaatatcacaacaaccttttatatcaaattcccagcctaatcaaaaggtaattgtttcctggagaatcaggttaaaagacacagaggtttcctttagtttcaacagaaaagaaaaccatgattaattagcaatgtctgacgttgggcttggagtaaaggaatgaggccagtacttgcttaatttcatttgcatgcaaaccagtggtaaccaagaattggacttcaagccaaatgcaaaccaaccaagaattggactttaagcaaaatgcgtatcatttatgttctgtgtaaccagaaaagtcattgaagatagtccttactgacttgatttcactcttctataaaaagttccaaggaagtttttaagattttcaccaaattcacaaggcgtttagactttcttcatttgtacagctctccagtaaatcagaatgtttctctaaaaattgttttgaacagatacaaaaataaaagaaagtatcgtatctttagaaaataagggtcataatacatttcagtatggtattgcacaatcttctttgaggacaagtgtggcatttgctcttgaaaaagacaaaatatggttcataaatcctcgcctggcctcaaggcttaagggcaggtcattgactaaagctttgggctgctctaagccgagttgagttcatcaactcgactctcacgtttagatgccaagtgattatattaaaatagattctggggaacataaggattacaagaaaccaaaaatactgcatataaaaagaaaaagaaaagaatctaaaacataggaaactatgccatattactctaatatctagccaatatcagtacatgaaaaacaaaacctatatttaatggatataatctcaacaatttgattgctacttcgactactgacacaaatgcaaaactgtaaatactttagctcatgttttcaattctgttatgaatcacagttgcattcccatacataataaaagcaacagaaatatacagggtcctttcctcactaggaattgtgtaagcacatattatgtgtgtgtatcgnnnnnnnnnnnnnnnnnnnntgtaagcacatattatgtgtgtgtatcgtatatgtgtatacacatatacacacatatatatgcacatttaataacattacaaagaagaaacaattatctccactttcaagatagagaccctgaggtagaagttggcaaattgctgacttcacacagctgagcaacaagggcagcaatggtgtccaggtggcctagtgccagagcctggacacttcaccatgctcatactgcactgtgtctgggaaggattttgtgtattctgctgctcaagattatctaaactgagctccaaattagagtaagctatttttccaaggcacatagacttactcattttccatgttataataaaataaaacctgtcctcaatttattggcttttgaggggaaggcatagcacataaactgtattagtattttgtaatgccttttacaaatctgccttaagaccaccaaaccttctagagcctttccaggattcatactagtcaataaagcacaccaattcccagtgtggattcatttcactcacctgaaaacattctgctctgaaaccagactttccaactaggctgtctgtctccaaaccccagaaaccctactttcctgatgacctggccacatttgtctgtcaagacctatttcaaaataggtcttgctaaaagatttacaaaattgcaacaagcagaagtcctcccatttcctttgatttttcgtcttcctcatctggtctctcctgtcttctacatctctcttctatctcttctccttctttctactttctttttttaaaaaaatcttttctcttttgcatcactattttagccaaacacctgccctcctcctaaacaccacatgtgtcacaaaaagtatggacatttggagacatgtttcaaaatgaagagttgccctgttgagaagttggatttttgatctttttatctctagctgccattttttatctctagctgccatttgctgggaatgtgatttcagctccatgttcactttaacagatctatcctccctctaaaactatacatatatatatttatatacacatacatacacacacacacactacatacacataaacccacatatacacatgtgatatatatgtgtatgtatattcatatattttcatatattctgatacttcacagattatatgaactttccactattctcatttgcatagtcaaagcattttttgttacaagagaaaaaagtcagacattttcagataatttgactgaatattagatttttatagatgctaaataactggtaccaatttatgtccctaatttatactagtaatgtacaaaaatgatattaggctggtccaaaacaatattcctttccattacatatcagatattaacagttggttcattctctggtttgataggatttaaactcataacattgaaaagtcaatataacattcattcttaggacatttgaaatataaaattgttgaagacctttaaagtgagataaaatgggcccatgacttgcttgattgcattgtgctgagtcattctttgtgccttaatgagtaagcagttaaggacaaagtaaatgtcttcctcttcaacttctgcctgtgttcaattcccaacaaaaatttaaagacaactgcacagaaaagcaaaataataacttttccaaaataatccaagcttctactaatgataaattctttcatctgaaatattttaataatttgcttaatccacatctttattctgtgattgtagggccaaactttaggtaatagcattggactgagatttgtaaactttccaaccttccaggaaatgccccagaagcaacagaattcacagacagaagcaaaatacagggcactacagttcagacaatacaacaagagcgtccacgaggttaatctaaagggagcatgtttcacagtggctggactaccgagagcttggactacacaatacagtattatagacaaaagaataagacaagagatctacacatgttgccttgcatttgtggtaatctacaccaatgaaaacatgtactacagctatatttgattatgtatggatatatttgaaatagtatacattgtcttgatgttttttctgtaatgtaaataaactatttatatcacacaatatagttttttctttcccatgtatttgttatatataataaatactcagtgatgagaaaaaa

SEQ ID NO: 1746 - DNA, 1435 bp, Homo sapiens
ggcggcagagctcgagaggcggctgccgggctgcggggcgccttgactctccctccaccctgcctcctcgggctccactcgtctgcccctggactcccgtctcctcctgtcctccggcttcccagagctcgctgctttccctacctccttaagtgactgccaaacgcccaccggctggaattgctctggttatgatgacagagaaaatgatctcttcctctgtgacaccaacacctgtaaatttgatggggaatgtttaagaattggagacactgtgacttgcgtctgtcagttcaagtgcaacaatgactatgtgcctgtgtgtggctccaatggggagagctaccagaatgagtgttacctgcgacaggctgcatgcaaacagcagagtgagatacttgtggtgtcagaaggatcatgtgccacagatgcaggatcaggatctggagatggagtccatgaaggctctggagaaactagtcaaaaggagacatccacctgtgatatttgccagtttggtgcagaatgtgacgaagatgccgaggatgtctggtgtgtgtgtaatattgactgttctcaaaccaacttcaatcccctctgcgcttctgatgggaaatcttatgataatgcatgccaaatcaaagaagcatcgtgtcagaaacaggagaaaattgaagtcatgtctttgggtcgatgtcaagataacacaactacaactactaagtctgaagatgggcattatgcaagaacagattatgcagagaatgctaacaaattagaagaaagtgccagagaacaccacataccttgtccggaacattacaatggcttctgcatgcatgggaagtgtgagcattctatcaatatgcaggagccatcttgcaggtgtgatgctggttatactggacaacactgtgaaaaaaaggactacagtgttctatacgttgttcccggtcctgtacgatttcagtatgtcttaatcgcagctgtgattggaacaattcagattgctgtcatctgtgtggtggtcctctgcatcacaaggaaatgccccagaagcaacagaattcacagacagaagcaaaatacagggcactacagttcagacaatacaacaagagcgtccacgaggttaatctaaagggagcatgtttcacagtggctggactaccgagagcttggactacacaatacagtattatagacaaaagaataagacaagagatctacacatgttgccttgcatttgtggtaatctacaccaatgaaaacatgtactacagctatatttgattatgtatggatatatttgaaatagtatacattgtcttgatgttttttctgtaatgtaaataaactatttatatcacacaatatagttttttctttcccatgtatttgttatatataataaatactcagtgatgagaaaaaa

SEQ ID NO: 1747 - protein, 364 aa, Homo sapiens
LSLHPASSGSTRLPLDSRLLLSSGFPELAAFPTSLSDCQTPTGWNCSGYDDRENDLFLCDTNTCKFDGECLRIGDTVTCVCQFKCNNDYVPVCGSNGESYQNECYLRQAACKQQSEILVVSEGSCATDAGSGSGDGVHEGSGETSQKETSTCDICQFGAECDEDAEDVWCVCNIDCSQTNFNPLCASDGKSYDNACQIKEASCQKQEKIEVMSLGRCQDNTTTTTKSEDGHYARTDYAENANKLEESAREHHIPCPEHYNGFCMHGKCEHSINMQEPSCRCDAGYTGQHCEKKDYSVLYVVPGPVRFQYVLIAAVIGTIQIAVICVVVLCITRKCPRSNRIHRQKQNTGHYSSDNTTRASTRLI

SEQ ID NO: 1748 - DNA, 2078 bp, Homo sapiens
atgagtgtgcgggtagcccaccctgaagcccgagcttctcatttgagccatccccgcctagccccactcgggccagcgcctggcgagcgagcccatctgtggcttccgcggccgcctcctccttgcatccttgcacctcctcgtcgacccctccctcccgggacctgcatcctgctccaccaatcagagcccgactgcctcttcccacgtgaccccgggcgggctgaggacctgctgcttcccaaacgccagagggatgcgggcggcagagctcgagaggcggctgccgggctgcggggcgccttgactctccctccaccctgcctcctcgggctccactcgtctgcccctggactcccgtctcctcctgtcctccggcttcccagagctccctccttatggcagcagcttcccgcgtctccggcgcagcttctcagcggacgaccctctcgctccggggctgagcccagtccctggatgttgctgaaactctcgagatcatgcgcgggtttggctgctgcttccccgccgggtgccactgccaccgccgccgcctctgctgccgccgtccgcgggatgctcagtagcccgctgcccggcccccgcgatcctgtgttcctcggaagccgtttgctgctgcagagttgcacgaactagtcatggtgctgtgggagtccccgcggcagtgcagcagctggacactttgcgagggcttttgctggctgctgctgctgcccgtcatgctactcatcgtagcccgcccggtgaagctcgctgctttccctacctccttaagtgactgccaaacgcccaccggctggaattgctctggttatgatgacagagaaaatgatctcttcctctgtgacaccaacacctgtaaatttgatggggaatgtttaagaattggagacactgtgacttgcgtctgtcagttcaagtgcaacaatgactatgtgcctgtgtgtggctccaatggggagagctaccagaatgagtgttacctgcgacaggctgcatgcaaacagcagagtgagatacttgtggtgtcagaaggatcatgtgccacagatgcaggatcaggatctggagatggagtccatgaaggctctggagaaactagtcaaaaggagacatccacctgtgatatttgccagtttggtgcagaatgtgacgaagatgccgaggatgtctggtgtgtgtgtaatattgactgttctcaaaccaacttcaatcccctctgcgcttctgatgggaaatcttatgataatgcatgccaaatcaaagaagcatcgtgtcagaaacaggagaaaattgaagtcatgtctttgggtcgatgtcaagataacacaactacaactactaagtctgaagatgggcattatgcaagaacagattatgcagagaatgctaacaaattagaagaaagtgccagagaacaccacataccttgtccggaacattacaatggcttctgcatgcatgggaagtgtgagcattctatcaatatgcaggagccatcttgcaggtgtgatgctggttatactggacaacactgtgaaaaaaaggactacagtgttctatacgttgttcccggtcctgtacgatttcagtatgtcttaatcgcagctgtgattggaacaattcagattgctgtcatctgtgtggtggtcctctgcatcacaaggaaatgccccagaagcaacagaattcacagacagaagcaaaatacagggcactacagttcagacaatacaacaagagcgtccacgaggttaatctaaagggagcatgtttcacagtggctggactaccgagagcttggactacacaatacagtattatagacaaaagaataagacaagagatctacacatgttgccttgcatttgtggtaatctacaccaatgaaaacatgtactacagctatatttgattatgtatggatatatttgaaatagtatacattgtcttgatgttttttctgtaatgtaaataaactatttatatcacacaatatagttttttctttcccatgtatttgttatatataataaatactcagtgatgagaaaaaa

SEQ ID NO: 1749 - protein, 374 aa, Homo sapiens
MVLWESPRQCSSWTLCEGFCWLLLLPVMLLIVARPVKLAAFPTSLSDCQTPTGWNCSGYDDRENDLFLCDTNTCKFDGECLRIGDTVTCVCQFKCNNDYVPVCGSNGESYQNECYLRQAACKQQSEILVVSEGSCATDAGSGSGDGVHEGSGETSQKETSTCDICQFGAECDEDAEDVWCVCNIDCSQTNFNPLCASDGKSYDNACQIKEASCQKQEKIEVMSLGRCQDNTTTTTKSEDGHYARTDYAENANKLEESAREHHIPCPEHYNGFCMHGKCEHSINMQEPSCRCDAGYTGQHCEKKDYSVLYVVPGPVRFQYVLIAAVIGTIQIAVICVVVLCITRKCPRSNRIHRQKQNTGHYSSDNTTRASTRLI

SEQ ID NO: 1750 - DNA, 21254 bp, Mus musculus
  misc_feature (1)...(21254): n = a,t,c or g
tttgagcactggaggagaagactgcaactgctcctggcagacatgaagccgtacttctgccgtgtctttgtcttctgcttcctaatcagacttttaacaggtgagtggccatccatagctcttattgagttctacttcaagagaacattaagaaaaatctgaagtagaaaaattaagtaaaaatggaaaatgattttattttattttattttattttattttattttgtttttaacaagcacagacagtttcagaggcactgaagctcacggctcagggcgtcatgcccggtcagcgtggatgtcagtgcttcttttgatactgtgttttaacatgaaaaagtacatttcaacagaccattaaaattttaaattacttgttcaaagttacctgacagtgtataaagtaggagagtagctcactctttttagagaaagatgaaaggcaagattatttgtgtcaaaagaatagaaattgaatagccctggaaatccttctatagtagagaaaaaagtggatgacttccaaaaggaaaattttgactttactcttacctggttggtcctaagtcttaaatgtacagtctgccatagggttggtggtttttgttttgttttgttgctttttatttttgattgttttgtttttcaagacagagccataccaatcctggcttatcttataaggcttttagacactagatatgaagatcaccccaaatgtaaaaagggggagaaaatgactgacagcattcactagtccctctagaccttaaacattctggaatctttgactctttttcgtgggtgacatttatcagactctacatgagaagtttaaagagggtcatgtgcagtgtaagtaattacatacagtcttttgctgcttcttattatatgcacttacatactgttcttgaaattgggataagtgaagtgaaacattaagtggtgggaaatgcctttaataggagaagcaaaagcagaatgctcagtggtataagtccatctggaaatgcatttttttcagtggtagaaagaaggagacattacttttctctccaaaaagaagtcaaacctaaaattggatttattaaacatttagtattgtgctgtttcaaaggcactcaaatgttcttaagaaggatgaagagcgaagaccttgttgtatttacctggaagaagtactaagaacagctctgggccagatgtgttttctactctgcacgctagttttacaacccccctgaaaagcttagcagcatacgtgaaacaagaaaaaccatggcagggagatccactcatttactcatccactcatccgttcattcacgcatcactggacacttgccatgcaggagatgctgggctggctattgtataaacagtggtgagcaagaccaggcaggcccactctgctgagactagctgagtactagtgaaagagacatgaatcaaacaatcgtatgaattgatggcaagagagggcaccaaggatccaggtcagacagggaggtgtgtgtgtgtgtagctagagccatacagactgttctgtggaaatgacgcttgagttgaaattggaaggacagataggaatcagtgggaagagcagtgtcaagagaggaaagacaattcaatggaaagtcaatccaaaggatctgtagttttcaaggaaggtcagagggctgatgtggctgagcacagggaggaagggaagctgggcatgatgccagatgaggctaagaaagaagtcagtggtcagacttctcagcccacagggccatgctaaagagtttggaatttcttccaagaacatttgtacaagttattgcatggttggtttgggatgcatcaaaagttttctgtatcccaaacccattcgggtagttgtggtggtggtgctgtactcaaaagacttgtatcaacagtggtgtcatttctgtagagggatggattcagctgtaggattctcatgagttgccaagctaagctgatcaataagatcttctggaatagtcacctgagatccttagtgagtaaaaaccaatgttcgttagtcttatgacacaaaaaaaactgtgttatgtagaatgccattttccaatgacaggtaaacaggggtaataaacatgccaatgatcatcatattaaacgttgccctaggtcacacacacccaggaactcctaatttcatagctataaacagaaccaaactgcaggaaactaaacactcatgggtagttataacacttttagtgtttctaactcttggctctgtcttgacaaaatgatacagggattcttgccctcaggcagtactgataaagactcataaaccagggaaggctaagtgatttgtcacacaacacttagtggcagaaccattggtagaagcccaatgtgcccagctccattgaagatttgtgaacaacacaaattaagaagattgagaattaagaaggttgagagtcttgaacattcccagtcttcaatggatctcagtgtaaaagtctacaaaatatttttgttttaatgattctggaatggcagaaggctctttcttacagaaggatccgcagaaagaagctataagagaagagcccctacttgggcaatgggggtggtgtgggtgacctgctgaattctggctttaggaagactactttgaaggcagtgtagagtgaagccagtggcaatgactgacagctggtgatatccagcaaatgcttgtctcagaaggtattctcctaggaagctgggatggtagacctcagactcactctatctctgacagtgactgaacagttactcgagaatcccaccatctctggagaaatagccatttggtgttcttagcaccagatcctccccacagagctcagagaggtctggggtgatgagctgacctctgggtcctccctttgagcacctgtttctagaattcaaactgcattgaaaaactctgcattgctaaccttttgtctggatagatgaatgtaagccattctcagcatgataagccttgattttatgcctccaagagtgtatgtatttacctctgattttcctgtgttatttaatctccttgtttttctctgtgttttgttgagatagtaacctttccttttaaattctctggtgaatatgaaaggctgacgatacttttttttttttaaagattctttttattttatgcaattggatgttttgtctatacttaacgcctgtacaccacattcatatctggggtccatggaggccagaagagggtatcaggctccttgaactgaggttagagatggctatgaaccaccatgaaggtgtagagatttgaactcagatcctccagaacagcagcaagtgctcttagtaaccaagtcatctctccaagccctgatgacacttcttaatctatcaagttgttatgttcagagaaccataatgaataattagttaaatttattcattgctgggaattgatcccaggaccttatgcttgctaacatgtgttctacaactgagctgcacttccagtcccatttactacttttttatagaaataagcattgttgtgctgtcgtctgtaatgcctaacccctagttgccacactggcataagaaccttgaagtgaccttctctctgccactcttccactggccccatcattggtccacgcatggccttagttgaaatcgcctcaagtaagagcattgctgtgttccctcctgagagcactcctctcctgtccctctaaccctttctttgtccttctatcacagaactggacttcagagtcagcatcaatgtggatgctgctcctttcttgaggcctctgatttaaccagtgctcagagcccttctgttagtctcaacacaggggactatgtctccctccttaaacattggggggaaacctttatggcttaaagttactagtaccacagacaccattctcgtgactacgagttctagtctgtagttgctctccctggaggttttcatctaagctctgtggctttctggattgcagattaagcactttatgctagtctgagtctttttttttttttttttaacttaatcaaagaaaaatctttctagtatttagtgaaaaacaatttttagacaaggtctcaggtagcctactctggctttgaactttggattctccttctacacctccctagtactgggattataggtatgggccaccactggtctatgaggttggagactgaacctagggcctcctgtatgccagaccctaccaactgaccaactgccatacttgtagaactctgtgatcttgaaagccgctcattttaacattgaaattcaaggatttcaccctcacatggctctctttctcacgtattttcatgaactctgtctgggaccagacactccgtctcaatttgtgaactcaaactttattccttatttccagtaatttttttcttcttctagtgttggatcacattttcttctttgtctccccctctttctagaaatttctattactctcacgtgaaacctttctcaccagtgtgaacaaaattcctctcatttttatgcttattaactacagcttcttcagatctattaagcttttaaagttactagaaccttacaagtaacctgtaggcacacagagaaagaaaacaacccaactcttgtcttagctttgcccacaacaccatctatagcatttgttactcgatgtaaaatgttcacaccagcaagtgtaataaattgaatgaatattgtcacctatgctaccttcctcttctaagatcattcgatcattctgtttgagatgtaaagtgaattcctgagctctccaatttagaaaagatttaaatcattcatattttctacataagtggtgactgtgtttcttaatcttctaataaacaagttacttgtctagtaaacaaagtctgttacgtggtaggtttcagtcaatctgggaagaagaaaatattaaatttatataaaaattcaaaattatgttttaaaaagtagagcctaagtatgtgcagaccatgaaacatggaagttgaagctgttggtcaagccatggtttggtttcactggtttggtctgtaaagttgtctaaaacagacaatggtgtgcaaatctgaagagagactagaacttggggctgggagcttctgagggccatgaatggtagtgtgtttctatgactgctttgctcaaggaaaagtggagaagagataggttatgactaagcagagcaatagactcaagtgtttgtgtgaacttgaccatgggtgctgatgaatcaactttttctgagtcatgttgttgcaggtaaagtacttcccacaagcaatccaagatttttcagaggggactgcttttacatttgagaaatcagacttaaacagctagtgtttatgctggccttggagaatccatccatgcaacagaaacaacataggcacttcattacactcaaaatcagtttgtaccatctaagattcaagcaaaaatactataaaatgtctgtttgcacttgtttaattatacatatataattgcatttttacaggaagacaaattactggaaaaatttcgtgagaaatttcgaccctgatatcaagaattcagattattttttcaggtttaaatacacagggcagcttaatacacagtggttgataaataaatatctagataactaaaggtgttaaacacatgtaattgcatgtttgaggagcaatcttacttttatttggtggctaattgctttttagtcacagaacacatgcacagcaccaatgcaagcactaagtatttgtcaaactaatacatacaccttaaaggaaaagaagaaaggctaagaggaatttgcacctctcacttaacatttcttttcccatagcaaatctcttcagatcctgtacttcagtgtctgtaaagtgaggggtctggatgaggatatcagactgggaggcccattcagtaagtggactctgaggtcacattgattcaatggacaacttatagttactgctgactttattagcttggataaaggctattggatatatataaatatatatatatataaagccttagtttccccagttgtaaaacagggattaagaaatgaccgtctgacttaaaagttagctttggaaagcaagtgatatattttttataatacatttaggaatgtaccctgtaagtagttaatacaatggaagctcctgaaaatgattgggattcaaaaaattggatgggcatcaatcattttgaatctttggccttgccttgtaatgtaagcgctccccaatttccagcaaataagacctctttctccatttgtcttattttcttggtccatgctaagagcatgttgaaccttcatggcctaatcttcatttatttaaaaaaaaaagtatctttgaattcctactgtgttccagatcccaggagcaatgcaattcttatccttgtagacttcatgattaaatgacaagaataattaggatctactatatatgttagaaatatgttggctaagtaaaatgttaagagcatagagttaggagtctttgggcatctcagcaacagataaagggaagatttgctacttaaaacagttcttaaagaatgaaggagtatttctagtgggataaggggcagattgaactttgtagtttgtagaaacagaagaagtgctgtggaggggatggcctacaacttcagtatggctggaccagatggcccatgggatcacggaggctttggtgtcatgccaaagagacaggctttttaccttataagcaacaggggactaatgaagactttcaagctggggaataaaatgttctttagaaacccaattttagaggcagatggaggaaagagacagacatgtgtgtgtgtgtgtgtgtgtgtgtgtgtgtgtgtgtgtgtgtgtgtgtgtttattttggagtggggatgggcagctaagaagttgcttctacagatggaagaagacacaaataaggtttggattggcaattggaacagagaagaaagactaagtacaagagatttctataagctagagtcaactgaacttagtgactgattggatgaaagagtcagagaggagaagagatgatgaaggctctgcgtgtcctgggcctggtcagtgattctctaaagatacagtgtagggtttagtgagtgaataaggttttgcttgggcatgctacacttgatgtgttgactgtatctagagagagatgctaaaacggataggaaattggcctggagggctgagctggagataagcatcaatgtaaatgagttcacacacagatgtccttgtgtgtgagcttaaagcactgtgcatggcaactgggaagaggaaagcaatatttgtattcatgatctcaacaccaatctcccctcccctctgtggaatagagctgatttcacttaatctcatgtgatttccttcctatgataatttcaaaccagtggcagcgagatcactaacagagtagtttatttgcaaattaattatgctgtgaatattgattcaaagttttacagcacctttggggtttttccattttcacaaagaaaataacttttaactagaagaaaatgggactttcacttttcttattatacatgcttagaaaaccaaggttgttttcccctccctttcagagttccttggagagtaaaagcagctgtcatagtgtgtgtgtgtgggggggnnnnnnnnnnnnnnnnnnnnnnnnnnnnnnnnnnnnnnnnnnnnnnnnnnnnnnnnnnnnnnnnnnnnnnagagggagagagagagagagagagagagagagagagagagagagagagagagagagagagagagagagagagaacattttggtttgtgggggttgtctccagttttccttacatttttggtctgctttctctaaatggcatagggtttattttgctcactcatcctactatggaacctactctctcttactgggtttagggatgtttttgaattataatgtgagtgtaggcacaatatacagataagagcctaccagccaggattctaaagggtttagctagtggactcataagtgccacgcactctggttgagtcagcctgtcccagagggtctgcggcacacaagaaatggcagtttttatgaaagatgaaagactggtagaaaacacatttttaaaataatgctaaaattcacgagtagaagatcaaatgtaacaagtctctaatacaatcatcttaactctgataaaagtcttttgtgtcacactctcgtgctatactgagccacctgaagcttatcattgtttgactgcagaaaatatgtttaataagcactatcaataattgcaaactcagaagatcttatcgctcactctgagacctttgtagaggtttgtggttagaagtctgagttaaaaagaataaaatcacattgctagtctgttttatatcctctgcatggtgtggggtctctatatgtttctttaaagctttttttcaaccagagctaatacaactgcttatagagtcccagctgcgtaagtcctaggtgcactatctgatacttaaaaataaaatacgttggatatcaaaggcatcaatttgcaagtagaatctctgaattctcctggattctttcttcggggagggacctttctcaagaggttttcttctttttcctcctcttccttctcctctgttcagcttcttttttctgttggttgggatatcacctcgctttgtagtcaaggctgggcttgagctcactatgtagctcaggatgggcttgatcctacggcaattcttctgcttcagcctcctatatgttgggattataggatgcattatcatactggctccagagatcttaaccgtccctaaaataaaagacacaaatgctcttatttttggaaaaaaagaaaagaaaagaaaagaaaaagatctaaaaactcccataatacaaaagctctgactttgcttttgaaaacagtccattggtagtattatatcataaaatccactttattttaaaaactattataaaaatcacaacagcaggtgacacttttgagcctggtgagaagagtataccctataagatgtagtgctctgagtgattaaaaaaataaatctaccacctcttctctagagtgaatatcatctagatgtgtcaacagagggcacatgtacattgctatcaaagtgttccacttaacactcagattttaagacatcacaaggatataaatgagcacattactatttgtgctttagcttaagtgttgaaatgtgtatcattggtgcttggatttaaaaaaaatcactaatatgtggtgtttatagacattcggtggattagcagaatgcttgttctggcggcccatggcctgttcacacactgggcagattaaactattatatatttcaagagagttaaagaatcagaattaaacctgtctggccctaagtaatcatgaaaagggaaaaaatcaaacaaacaaacctgtcagttagcttggcaaacctttttgaacctggtaggtatctacagttaagagtatcactcccacccatttttctgtctttctccccctgtgtgtgtgtgtgtgtgtgtgtgtgtgtgtgtgtgtgtgtgtgtattagagcctgtgcatatgtgtatgcatgcatgcatcttgaggctagaggttaatgaccggtgcctttctctagtgttctttacgtttctttgagacagcatctttcactgaccctgaagctcaccgatttggcttgagtagctctatttggctctattggctttttttttttaagggctttctttatttcannnnnnnnnnnnnnnnnnnnnnnnnnnnnnnnnnnnnnnnnnnnnnnnnnnnnnnnnnnnnnnnnnnnnnnnnnnnnnnnnnnnnnnnnnntcccccataccctccccccactctctacccacccactccccctttttggccctggcgtttccctgtactggggcatataaagtttgcaagtccaatgggcctctctttgcagtgatggccgactaggccatcttttgatacatatgcagctagagacaagagctccggggtactgcttagttcatattgttgttccacctatagggttgcagttccctttagttccttgggtgctttctctagttcctccattgggggccctgtggtccattcaatagctgactgtgagcatccacttctgtgtttgctaggccctggcatagtctcacaagagacagctatatctgggtcctttcagcaaaatcttgctagtctttgcaatggtgtcagcgtttggaagctgatcatgggatggatctctggatatggcaatcagtagatgttccatcctttcgtcacacttccaaattttgtctctgtaactccttccatgggtgttttgtttcctattctaagaaggggcaaagtgtccacactttggtcttcttttcttgagtttaatgtgtttagcaaattgtatcttatatcttgggtatcctaagtttctgggctaatattcacttatcagtgagtacatattgtgtgagttcctttgtgattgggttacctcactcaggatgatgccctccaggtccatccatttggctaagaatttcataaattcattctttttaatagctgagtagtattccattgtgtagatgtaccacattttctgtatccattcctctgttgaggggcatctgggttctttccagcttctggctattataaataaggctgctatgaacatagtggagcatgtgtccttcttaccagttggggcatcttctggatatatgcccagaagaggtattgctggattttccggtagtactatgtccaattttctgaggaaccgccagactgatttccagagtggttgtacaagcttgcaatcccaccaacaatggaggagcattcctctttctccacatcctcgccagcatctgctgtcacctgaatttttcatcttagccattctgactggtgtgatgttaatgaattccaagactttctccctagccactctcagtgctggggttatctaggcaggctggcatactcacctttgtttatgggtgctggggatctgaactgacgtctcagacttgcatggagctccccagtcatagtgcactgctgtcgctctttatattaatgagccaaactcagctaaaggctaagaagaatttatgatttgatatttagcacatccgtcctataggtacaaagtaatttcaaggtaagtatttaactactgtggttgcaaacattcaaattgcacgtttacagttgccaaacttttttttttcagactgaaagcttaaaacttaagcatagggaatgtggaaacatgagtcagtcttctcattagcacattcaataatggaaaggtgagccaggacgtgtttaagctaagaatgatcatcaacatgaatattcatgagtacctgatagatgacactttggaggctgctgttgattttaataccctcggttctgcatataagaaaaactgaactcttcctagccatcccatatcattctgtaggcaagaaagatagttgcactcattttagcattttccagagtccttggaatattcttttttaaaaagaagatcgtgggaaacatgatatcattgaagggaactcacctggcagtgaagatgtctctcttgattgtctgtgatctcttctagatgcgttaacccacagaaagtaagtgttggaaaggatctctctctctctctctctctctctctctctctctctgtgtgtgtgtgtgtgtgtgtgtatgcgcgtgtgcacacacactcgagtgcacagaagtacatatatatgtacatgtgtgtatggtcaacattaggtgtcttccttagtcacttttgaccttgatttcgagacagggtctctcccagaactcaagatcaccattttgcctcgtatgtgctctgcaagtccctaggttctgcctgtttccgatcctgcagcaccaggttatcaatgcacactgccatgccaggcttctggtgtccaaacccaagccttcatgcttgtgtaataagcaattttcccactgagccatctctccagaaagaactctttaaagacactcttttcacttattttacagacggaaagagaggcattcgcaggggtattctaggcagagacctgcatgccaggcatgaggcagaacccaaactgtgctcttcggttccttgagcagcactgtacagcagtcccaaagctaattttcacctagtgccggcttgatggtcatagtgtaggcaaagaaggggaagctgctgacacactttttatgtgatgtgtgtatacagaggctatagacagttttgacccaggatctctttgtggtttgcttgctgccattctaaagtctctgggaaattttctctgaacaatgctaaaggaaccgagaagctgtccgctggctgatcttatcttctgcagcagatagcagagacagaggctgcagcacagcaggagtgcaacttggcacttactggcggaaagtcctcagacagcgcaacttcaacttcactggaagccagtgcaccccttgttgtggtccgatctcaccccctttgcttttaacttgctcctttaactctatgaaaagaagcgaaagccgctttattttccttctgcgtgcttttagactgtaagacaaaacacccagcagaggtgtgaacaaacaataaatgaacccttagagtgaataaccatgacacaggctacctcacccccacaattacctcaagccaaggataaagtgttgttagcacacacacacacacacacacacacacacacacacacacacagacccttttgctttctatgttctttacggatgcaaactctcttctccccttcaggcaagagcattatgggtggattttgtagcagccattcaggtgtttgttgcacctctgctctcagtggtgatgcagcaaatcaaaacgtgtgtacattcactatctttataatgtgttctgggcagacaggtggcttcttttggcacacatgtgatttctaattctgctgcctcatggatagtctgtatagcttctatgaagacatcactgctgtgtcctagacttgcattgtttggaaggtagtcagtgctatcaattttagacactctagatggtcgtatgtctagcggtgtatttttttttttgaattataaattctaaaatgtatgatttattagattcactttcttttttattgggtattttatttatttacatttcaaatgttattccctttcccagtttcccctctggaaaccccctattccatccccctccccctgcttctataagggtgctccccttataggtgggtggatgacccacctactcctgccttcctgccctggcattcccctatactgggcatcatgccttcacaggaccaagcgcctctcctcccattgatgactgacaaggccattctcggctacatatgtggctggagtcatgggtcgctccatgtgtactctttggttggtggtttagtccctgtaagcccggggtaggggttgggggtcaggttagttgatattgttgttcttcctatggggctgcacaccccttcagctccttcagtcctttttctaactcctccattagggaccccgtgctcagtccaatggttgtcttggagcattcacctctgtatttgtaaggctctgacagagcctctcaggagacagctatttgtaaaatcaactccacatcttttctacctggctcgaatttttacttttaaagtctagggtaatggcagtcccagatgactctgactaaaatccccggacagagacttttctggactacacccaacatgagtgtcagtttcctgaggtttctctgtattccaagggcccttccagcattctttgaaaagcagattattgaaggaaacacccccagcctccttgctttgctgactctaggagataaagcagaaaaagaaagaaagaagagcaaaatcgccacggaagtcctgctcccgcccctggttccagggccttgtttactttgagctgcattttctagggtaattacttaatcccagcaacactacctttaggcactctgtttaccatttcctgttttatggttgaataaagtgtgttgactgatacaattagaagctggaacacttgttgtttgtcttttatagccatgcctctcattggaaaataacccctaggactatgagaggaatgcactcagggctagaggcactaaaataaatatatgaattgataaataaattcaaagggattttgatgaagcttaaaagatgctaaggcaccaagcaaattgatgctgatcttaatgtaagcggtacccttctttaaggaagtaatatgctaagatgaatttggacaaatgccatagtgtttacagaaaagccaagtgctgagaaaagtcctggtaccaccccagtgctaattttaataaagcatggaaaatggacactgatggctcagtatacactcattaaatgatcacaacaatataataatgcgtttgctatgcaaaataatgccactaaaagtcaaaatcaaaaatacagaaatattttttgttttactagggatgggtattttttctttaaactttttttgtattgtttgatatttttaaggaaaaaaaaagagatttagcaacttgagtaagaactaccattctgatatttttccaaacaattttagtgtaaagtttttcattaaaaaaagatacatcattttaaaaaagtgacataaaccaaacaatttgaacctataagccagtagttcacaatctataaccaggttaaaaccatttcagtgtcttcctcctgtgatctccatgaagccctcaaggccaaccctggttccagtgatcctaaaaagtgaaaaatgagcaaaaccctgggacctcaccttgatgactgggtcaattcggttcttagtgaatggaagacatgctattgtccaatcatagcagagctgtttctttcctttccagttggaggatgtaattctctctgtctctgtctgtctctgtctctgtctgtctgtctctctctctatatatatatctatatctatctatatatgcacatatatatttaattttagctccagtaaatttgcatacttttaaaagcttttatttgccataatatctccctaaaagtttttccttattaagttaaaagagactcatgctgtggtttcaggtttaaaccttctttaaaggcattttctgaccctacagtgaatactgtaacacaccaccgagccctaccacatttccccagagggcacgtctttgttccttagtataaatgatggcaaatcaacacgcgtttatctgtttaccatctgcgtcccccacccccatccccagtgtggaacctgtaaaagcgtggagactatctgagtcatattatctaaacatgttacttgatacataacattttatattctgtctatcacatgaaaagcccatttctcattaggtgtattctagtgcatagttttctcttgtcacattctggttttgtttgcttggctataagatctttcattttggtatacataggagtggctttataaaaagaaatcacttaagttctcacttaaaaataattattatggcaatgtgttcacaacataacacacttgctttgttctcttttttcatccaggagaaatcaatggctcggccgatcataggatgttttcatttcacaatggaggtgtacagatttcttgtaaataccctgagactgtccagcagttaaaaatgcgattgttcagagagagagaagtcctctgcgaactcaccaagaccaagggaagcggaaatgcggtgtccatcaagaatccaatgctctgtctatatcatctgtcaaacaacagcgtctcttttttcctaaacaacccagacagctcccagggaagctattacttctgcagcctgtccatttttgacccacctccttttcaagaaaggaaccttagtggaggatatttgcatatttatggtaaggcattggctgcttttatcatcgtgccttaaaagtatatgctcatctccaagacttctcccaccaagggaaatacacctctctctctctctctctctgtgtgtgtgtgtgtgtgttgtgttgaaattcctttagaagtagttgacagcagctcattttggatgaaatattcatgaaatgatatgtcgttaatattagttgatatttatttggaataagtgatttatttacatacactgttaagttagaattagggcacagtctttcgaaatctttcatgactcagtggctattccgtctacttgcctaaggttggaagcagcttggagaatgaggtgagccgagtgaacatcagtgttacaccaagtatgttcccacgtggtcttgtgaaagcagcagacaggaaggcaccacctattagtcacatttgtaaacacactagattcgtaaagtttcttgattaaaaaccttctttacattttatgaaagcattctctacttatgaatgaggacacagtctttcattcagggtctttcatcaacatactttcccctcttcaacccagaatcccagctctgctgccagctgaagctctggctacccgtagggtgtgcagctttcgttgtggtactcctttttggatgcatacttatcatctggttttcaaaaaaggtaagtgatttttatttttttcttatactttctttcctaggtgttttttttttttctctcatcaaagaatgacagatgcttctcagagtaacctgagcaaaggatataccacacattttccttaagacacgcatactaattaagctaggatagaccatgcattttcctcacaaggtaccaatagtagttaagaaggaaactgctttttaaaaatatgttacatcatctaaacttgtttttaagaaaaatatctgaaaaactattctggacagtattaacagggacaacgaaatatctttttgtggtggaacttttctttagctgttcacatagcaaactttgcaatcaaagaacttactgcattctgcatattatgagtatgagtatataagttggccagactgtgtgtgagtatgtgtgcatgtgtgtgtatgtgtgtatgaatgagtctgtttatgcatacgtgtgtatgcgtgtgtgcacatgtgagtgtgtgtgtgtatgtgtgcatgcacaactgtaagcatatgagtctattctctccttgtatcacttcagatactgggaattgaacactcaggtcatcaggtttggcagcaagtgcttttacccactgagccatctcaccaattcagaaagcccctttcattgggaaccttttgtatattgttttactgagcttaagtccataattacacttttgtcacatgctacttctacaaaaaaaatccagaaaacacttggaaaacaagcatgaagatgggaaagaacagataacaagccatgtttctaactatctctttcagaaatacggatccagtgtgcatgaccctaatagtgaatacatgttcatggcggcagtcaacacaaacaaaaagtctagacttgcaggtacagctccccttacggctttggggagggaagaacacacttcatggttaagactggaattaatttgtttatttctattttaatagattttttccctaaggataattttagtattttatgtgaaagtctgaattttcactttaactgggcttatgtactctgtagaatattaaaaattatgtttgtgaattggttttagtaaattatcagggttaaagaatggagttcagctagtgtaacatagatgaagccctggtttccatcccagtactacacaaatgggcacggtgttacacatgtgtaatcctagcacttgggggtcagatcgtcagaagggcaaaggcattttcagttacgtggtgagttagagacccatctgtgatttataagatactgtctcaagattatcagagagatggggagggggaagggaagaaaggaaaggaaaggaaaggaaaggaaaggaaaggaaaggaaaggaaaggaaaggaaaggaaaggaaaggaaaggaaaggaaaggacaacaacagtagcagcagcagcaacaacaaggcccagactggagtaagaggatagcaattcaagcctagcctgggctacagaatgagttgcacaaggccaggctcagccacttgatgagtccttgcctccagacaaacagttaaaaaggagattgagatgtatgcagctcactggtagaacacttgcctaccatgcatgaggtcttaggttcaatccaagtaccaaaaaaaaaaaaaaaaaaaaaaatccatagttaacagttgtttcaaggtgattttcagagatgtatctggcttttccttgtaaagttcatgaaaccaggttgtggtcatttattgactatcctttaaatgcaagcttctgagtgaggtaccgtgtgggtgatgagaattttagatgaggctgggaagggagatttaggtggattctggggggagggggagttcatgaaagcactcagttgtttggaaaaatgtacaaggttagaacactttggtggagcttttgcctagtgcatggagagttagtggggagtactgtcaaatctgaggaatatccagagagcttgaaacacccactgtggaaaattttacacatcttgcacccatgggtaggatgatgtacgtaggacaggaaaagaaacagaagctaccacattcttgctaccactcaatggctcagcggcacacatagattgtcatggaatcactgcatggatgagggtctggccttgcactgttagtctttgctctctctttagatagctggagttgaggtccagactgtcagtggctccttcccagagagttaagatcacagctttggctcttgcaatcacttttatttgattactttgctcctgaaaacaacaacagcatacttcaccccaatcactgtcttaataataacgcattgcatcttagtttggattccctcaaatagagcttatgataaggacttgggtgtaaatagttcactggagtggtgatcccagggagaagtggcaaagggggagggaagagagacggggcaagaagaaaaggcaaggtgttggtgctaggttctggaggtctgccttaatgggacctctgtcaactgtacagagacctcccataatttcttttctatgaaggacagggtatggggtgcttaatcactggtttcattaccaacagttgggagctggatgcagagagcatctctccgtgctccctgaactggcctccaactaaagctgttctcatgtcttcaggtaaagccagaggcaggaaagtggggacagggatgggggggggggtcacgtggcactacagtgctgaagcagtcaacacatacccatgagagtcttacttgactgcatctggaccctgtgatggatggttcaaagttcagataatgtccagtcctcacatcaagagtggaatgagcaaaacttcatgggaaataaggacctgaagactggtgtgtgtgtgtgtgtgtgtgtgtgtgtgtgtgtgtgtgtgtgtgtgtacactacaaggaaaagcagaaagctgttgggaaggaactcaactcatgttgaatgttttgttacaggtgtgacctcataagctggaacacccggacccacagaggaaacgcatggactagttcccctgaaacttgaatggagaaattcttctattttctggaccacagggcacctgacttgatttaactacagacaacattctgctggtgttttgtttgtctggatcagtgactatcagtcattcagaatttcagcagactgccctgggtttgctgagtccttttaagatgaaccccttcttaaggaagacccagctcatatatattcaacaaacagacctcactgggatagaatgcccctctctccgtgcctgattctagctatgcactggccaggaaaacaaacatatctccagcatttttttacaaaaaatgccaagggtatgaatctgtaaagcacacaggcagccaatggccaccatctgtcctcatttttcagattccattttctttccatggagatcagcattctttctagaatcagacagtagagggagatgcttcacaacagaagcgcttgtgtttctgcgattttgatgtatatactttatcgaactcatgcattagaaccaacatgctctcttccaattcctagactctagctgatcactgcttcagggcttagatgcctgctcttgccttcaaatttccccttaaagatatgtccacatgtctacttggcagcctgctgccactccaaataggaagctcagcctacattccctcccacccctgttgctcaaaaaaaaaaaaaaaaattagtagatatgatgttcccatattctccctgccaaagtaattttttccagaaaagacatctaaattcagttaatatggtttactatgttgatattagtggtagtaaacatttctcagaaacaaaagcaaattaattttgctgtggtgttttctactattatctgtgtttccatggtgctattaatcacaagcttagctatttttgtagatcatattaaagttgcaagcaaggaaagcaaccctctgttaatgggcaaacattctcctggggtagaatgaattatctatttagcctgaaagctgcggtttctgggtggtggctgccagactacagccacactttgctctctctgggtttgacaggttgaagtagtccccctggagcagcactccaggctacgctggagtcccagagttgggagatgcctgggacaagctgctgctttggtctctgggatctgggaagtacagtagggccaagacagaattccctctcctagaaactatgcagcctggaagtcagccctagcactttaagatagccttctttagaatatgagttagttggaaggattctgaagtgtaaagagcatatgactgctctgagctggaccattttctctactttcctgtctgtatgcctaagacttctggagcagccaatgtgtatgcaacataaaaaaacaaaaaacaaaa

SEQ ID NO: 1751 - DNA, 2080 bp, Mus musculus
tttgagcactggaggagaagactgcaactgctcctggcagacatgaagccgtacttctgccgtgtctttgtcttctgcttcctaatcagacttttaacaggagaaatcaatggctcggccgatcataggatgttttcatttcacaatggaggtgtacagatttcttgtaaataccctgagactgtccagcagttaaaaatgcgattgttcagagagagagaagtcctctgcgaactcaccaagaccaagggaagcggaaatgcggtgtccatcaagaatccaatgctctgtctatatcatctgtcaaacaacagcgtctcttttttcctaaacaacccagacagctcccagggaagctattacttctgcagcctgtccatttttgacccacctccttttcaagaaaggaaccttagtggaggatatttgcatatttatgaatcccagctctgctgccagctgaagctctggctacccgtagggtgtgcagctttcgttgtggtactcctttttggatgcatacttatcatctggttttcaaaaaagaaatacggatccagtgtgcatgaccctaatagtgaatacatgttcatggcggcagtcaacacaaacaaaaagtctagacttgcaggtgtgacctcataagctggaacacccggacccacagaggaaacgcatggactagttcccctgaaacttgaatggagaaattcttctattttctggaccacagggcacctgacttgatttaactacagacaacattctgctggtgttttgtttgtctggatcagtgactatcagtcattcagaatttcagcagactgccctgggtttgctgagtccttttaagatgaaccccttcttaaggaagacccagctcatatatattcaacaaacagacctcactgggatagaatgcccctctctccgtgcctgattctagctatgcactggccaggaaaacaaacatatctccagcatttttttacaaaaaatgccaagggtatgaatctgtaaagcacacaggcagccaatggccaccatctgtcctcatttttcagattccattttctttccatggagatcagcattctttctagaatcagacagtagagggagatgcttcacaacagaagcgcttgtgtttctgcgattttgatgtatatactttatcgaactcatgcattagaaccaacatgctctcttccaattcctagactctagctgatcactgcttcagggcttagatgcctgctcttgccttcaaatttccccttaaagatatgtccacatgtctacttggcagcctgctgccactccaaataggaagctcagcctacattccctcccacccctgttgctcaaaaaaaaaaaaaaaaattagtagatatgatgttcccatattctccctgccaaagtaattttttccagaaaagacatctaaattcagttaatatggtttactatgttgatattagtggtagtaaacatttctcagaaacaaaagcaaattaattttgctgtggtgttttctactattatctgtgtttccatggtgctattaatcacaagcttagctatttttgtagatcatattaaagttgcaagcaaggaaagcaaccctctgttaatgggcaaacattctcctggggtagaatgaattatctatttagcctgaaagctgcggtttctgggtggtggctgccagactacagccacactttgctctctctgggtttgacaggttgaagtagtccccctggagcagcactccaggctacgctggagtcccagagttgggagatgcctgggacaagctgctgctttggtctctgggatctgggaagtacagtagggccaagacagaattccctctcctagaaactatgcagcctggaagtcagccctagcactttaagatagccttctttagaatatgagttagttggaaggattctgaagtgtaaagagcatatgactgctctgagctggaccattttctctactttcctgtctgtatgcctaagacttctggagcagccaatgtgtatgcaacataaaaaaacaaaaaacaaaa

SEQ ID NO: 1752 - protein, 200 aa, Mus musculus
MKPYFCRVFVFCFLIRLLTGEINGSADHRMFSFHNGGVQISCKYPETVQQLKMRLFREREVLCELTKTKGSGNAVSIKNPMLCLYHLSNNSVSFFLNNPDSSQGSYYFCSLSIFDPPPFQERNLSGGYLHIYESQLCCQLKLWLPVGCAAFVVVLLFGCILIIWFSKKKYGSSVHDPNSEYMFMAAVNTNKKSRLAGVTS

SEQ ID NO: 1753 - DNA, 24792 bp, Homo sapiens
ctgaacgcgaggactgttaactgtttctggcaaacatgaagtcaggcctctggtatttctttctcttctgcttgcgcattaaagttttaacaggtaagtggtgtattgaatatttcttattaagttataattcaagtaaacattaagaaaaagcaaaggtagaaaaattacgcacccaaaagacagtggttttggtttttgaaagtaggaatagtttcaggatatggccaagggcaccatgtcactcatgtcactgtggatggcattgagtttgcattgctgcctttgatactgtgtcttgagatgaaaaacatgtttcatcagaccattaaatttttaaattacctgcttggagttacctgtcagtggataaactagcagagtggcttactgttcttagagaaagatgaaaggcaaaatgacttgtgtcaacagaatgaaaattaaatagctctggcatttggactgggaattctttctgtggtagaaaataaaatgggaagtctttgaaaagaaggattttgattttaatcttacctggatgatctgttatctgaaatgtccagggcaccatagagtttttattgacactaagtatcagagttcaccctaaaaagccaaggaggaaaggataatgtaaaaatacttcctagcccctgtagaccttacaaaaaagatcattctggagtccctgattccttctcttgaatggcatatagcagactctatatggacaatttaaataatgctacatacaatgtaagttaatacacgtgtttctgctgctttttactgtatataatttgtactacttttgttttctctttcacactgagccctattcttgaggttgaaaaaaggaaagttaagtaatattaaataacttaaataatcaaataaactaaaagtgaaggcagaacttttagtaggtatgatcctatctagggatacattttttcagtggcaaaaaaatagaccttactgttcttacaaaaaatgaaaaaaaaatgaaatcaaattgatcaaatgtttcatcttgtgctggctcaaagtgagttaagtgcagttaagaggactgaggaatgtagaatgagcacaaggacagttttgggctacttgctggtttatgccttttctagaatctcatgaagtcctttagcggcatgaatgacatgagcagctttggaatttatattcattcttcattcatccatttactcatgtagcgttgagcacctgcctggtagcaggtactgtgccagatggtgtatgtacaaggatgagcaaaaccaggtcaacccctgttctttggaaggtaactgcatggtagagagagatatattaatcaaataatcccattgattaatgataattacaggcaaaactcaattatatgagggaatgtaacaaggagcttgactagactgggtgggtgtggaggtgtagctgaggagcagggttcattgaagtctttcctgtgcaagtggcacttgagcggagatttcaaggacaaggtagcaatcaatggggagaacggtatgaaggtagggaagaacgttccataccatggaaggaacaagtgcaaagagcctgtggcaggaaggaatgaggtaaggttagggaactagaagaaagcagacagatgtgcctgagcacaaagagggaagaggctgagcttggtccaagatgaccaactggtccaagttggtccaaggtgaggctggaaaggaaagtagaggccagaccattcagaccatatagtctatgttccagattttggatattcttccaagaacgttggtaccattcgtggaagggtttgtttgtattgataaaaatcattcaactaggccaaaccaatttgggcagttctggttgtggtattatgctcaggagaattaaagtagcatcggtgtcaattctgtggaaggtgagatccagccttaggtaggattgttttaagtttccagattaagctgatgaataatttgtattctggaacaatattcatcgtagattctaaatgaatacaaccaatgttcactctcattataaagaaagccatgagatgtggcatgctgtttggcatgtggcaaacctgaggcacgagtggctaaatggtaacaataaatctgctagcaatgatcctatttaaaatatctccacaatgcatgtatccagaaactgccatgtaaaagctctaaagaaaaagagccaaactcaagtaaactaagtacttgcttgtcctctgttgtattttcaatcctcccaatttacataggctttctcatgccatgaagatgtaggcattcttacctttagtcagtgtttgaagaatttccaaccaggaaaggttaagtgatttgttacacagtagttggtggcagaaccaaagttagaactctaatgtgactccaacatctacattctttctaaactgtgttgaagtagtggaggtgtaacataaatctaaaggaacgtaaatctcaatgattctgatcacctttgttatttggttgtgaattaagaaggatgggaatcttgctgatttctagtctttgatggatctcaatgtagaatttaacaaagtcttgtttttttttaatgaacttggagcaataggacacttttaattataaaaatatctacgaaaaatgtgaatgtctaactacattttgaagaccctctttgtagaccttataggcaacagggaccatatgagtgatgggacaaattctggttttagaaagactactttaaaagcagtgtggataatacaccagattgggaagggctgatggcagagggtgtctaataaacgtgcatgtattatgatgtgttctgtgaggaagctgggaggatagccctcaaggccactttgagccttcctttgtcactgaggcattccattagtgactcctgaattccacttgggaaaagagcccctcagtgtctccagcgtctgagagaagtctgtgaagatgactgaccctggagcccctcttagcctctccacgactgagtaaatgtcatctcctgacagcacccccttccagagtgttcttgttagatttaacaaaaatcccagttgtcaattttttcttttgatagatgaattcaggccattcccagtcagcataagcctctacttgattttatttctatgtttatttactacttatttttctttgttgtatcctctttttctcttttatttttgttggtgtgatgaaatttcttttgactctcctctttgcctccggttaatttggaaggtcgactacagttcttaatttactaagtaattgacatgttcaaagaatcttaattgaatgtctacttgtttatcattgtatgaaaataatgaaaatgcctttgtctgatgtgcctagtccccatcccctgcactgatatgagaacttaagaatgttcttcctttcccactctcacacttcccccagacagtgcaccctgctccatacgtgggttttgtggaaataatttaaaacttacagttgcagatcattgctaggtttcctcttacagtatttctcttctgtttcaagaatcctttcttaacacttacatcacatacgttcaatgacaacatcattctggacatctgctcctgtcttgtgatctctgttctaatctaatgatcagaagacttctcttattttcgttaaatacccccaactctctgaattccagtacaggtaagggtgtcttccttttaccttgatgagtgactgatatctttcctgggaataggagtcctggatggcagcctttcttcttagtggttgcagatattcctccactgtctgctggcttctagggttgtgggtgaagagtttgatggtagtctaactctcattcctttgtaaaaaaaaaaaaaactctagaatttcataatcttgaaagctatttacttcagtattggaattcaggaattcctccaggatatgtgtaactctctccctctgtttctctttctgtgtgtttctattaattttttttttgaggcggagtctcactctgtcgcccaggctggagtgcagtggcgcaatctcggcttactgcaacctccacctcccgggttgaagcgattctcctgcctcagcctcccaagtaggtgagactacaggcacccgccaccacgcctggctaatttttttgtatttttcgtagagacggggtttcaccgtgttagccaggatggtctcaatttcctgacctcgtgatccgcccacctccgcctccgcctccgcctcccaaagtgctgggattacaggcgtgagccaccgcgccccgctgttctattaatttattattattttttttaagactgggtgaaagttttcaatctctagactcaagctttattcttcatttcagtcatttttttcctagtatttgtttaatcataccttatgctgtttttccccactctttctagaaatgtctcttattcttatgtaagatcttgagtcccttattttttcatcatttgtgaacaaaatggctttcacaacttgctgttgcttgttaaccacaactccttcagatgaaatggatatttcagttttaagttactagtagcatattcccatttcttggtagaaacaaaatgcaggcatgtaggggggactgaaattcttatatttactcactgtaagattcatagcattatttggcttaaaaaaattcatcccagtattcacagttgtaaacagcaaaatctacaacatatactgcttccctactctaagaatattgagttttatatgcaaaatgacttactgggctttgcaaatttttaaaaatgagttttaaaatcatttgtagcttgcaataactgaagaaaagatcacaatttctctgtaaatggcatctcagtactactgctgttctaataaactaggtctgtcaaatggcactttttggtcattcaaagtgaaaaaaacatggcatttgaaaccttataaaaattcacaattatattttggaaagtggaacttaagtatgtaggggatatgtcacacaaattgaaagtgttagtcaagaaatgattttttttttcaatagtttggcctgtaaggttgaccaaaacaggtaaagatttgcaagtttagagagtcagaaactggggatatgaacttccttctggttcatgtataacataatgatgcttgtatctactttgcttgaggaaaaaaaagaaacacgttgtccccaaatagggtgatagaccaggagtttccatccagttgaccacgagtgttgttaggatctgtttatttgagtcatgttgacacagacacagcactttcaataagcaattaatgatcatttaaaggtaacttttttgaatttgataaatagattttttttacagcctgtatttgtgttcttctaggactttgcaacaaagaatctgtacatgcaaaaacaacaataacaacaacaagctgtctactgcactcacagttaaagttctgtttactttgcactatctaggactaatgcaaaaatctcatagatgtgcctatttgcacttatttaattatgatgaaatttacttctatatgtgaatccatttctgtacatttctacaggcagataagtgatgggaaaatcattaagaatttagacttcatcagagaagaacccaggtacaatgacagcccagcttaatacatgatggctgatgaatgaaaatgtctagggaaatgagtgtgttatgtacaatgtaatttcatatctaagtcactttaaaataattttttgatatataataaccctttcaatcacagaacacatatgtggcaccaatgtgaatactactttaagtattaaggtgataatatatccaatatacctagaaggaaaataaatacctgaaattcattttcatatctagcttaatgttaaaagcttctttttgtttttttatttcgtagcaaatctctttagctctgatgctttagtttctgtacaatgagaggattggactagattattaggtgaagagattaagtaagtgtgtgtaccctggtgtcaaattatcttattcttttttctttgtttttgttggactgggttaattcgaagaccttgtcttcaagctctgaatttctttcttctagttgctcaattctattgctgagactttccagagcatttcacctttctaaaattgtgtccaaagtttcctgaaatttttattgttttttctttaagctatctatttccttgaatatttctgccttcacttcttgtatcattttttgcatttccttgcattgggcttcacctttctctggtccctccccaattagcttaataactaacctcctgaattctttttcaggtagatgaagaatttcttcttggtttggatccattgctggtgaactagtgtgattttttgggggtgttgaagagccttgttttgtcatattaccagagttggttttctggttccttctcatttgggtaggtgctgtcagagggaaggtctagggctgaaggctgttcttcagatttttttttttgtcccatggagtgttcccttgatatcatactttccccttttcctatgtatgtggcttccagtgagccaaactgcagtgattgttgtctctcttctgggtctagccacccagcaaatctacccggctctgggctggtattgggggttgtctgcacagattcctgtgatgtgaaccatctatgggtctctcagccatggataccagtgctgttctggtggaggtggcgaagggtgcaatggactccatgagggcctttagctttggtggtttaatgctctatttttgtgctggttggcctcctgccaggaggtggcgctttccagaaagcatcagctgtaatagtatagagagggtctggtggtgggtggggccctagaactcccaggattatatgccctttgtgttctgctaaccagggtgggtagggaagggcagggctaggcatgtctgagctcagactctccttgggcaggtcttgctgtggctgctgtgggggatgtgggtgagattcccaggtcactggagttgtgtacctaggaggattatggctgcctctgctgagtcatgcaggttgtcagggaagtgggggaaaaccggcagtcacaggtctcatccagatcccatgcaaacggaagggctggtctcactctaatcatgcctcctctaaccgccccaagtctgtttccaggcaaagggcaagactggcttgaaaacttgcctgaggctttctgcctcccagctgtgaaagaaaagggctttagtttttcccctgcatgtgaaatctgcatgctggattcacggcctccccccagttcaggccaggagacttcttgccctgttcaaatagttacaaagttcagctagagaattccttctccctgtggagttttataccctgctcctctggccaccctccagatggatccctgtggtgcctggcaagaatgggctgcttggggacccattgagctcccagagcctttctgcagcttcctctacccctgtattttgctccgtttggctctctaacttgactcacctccagataaagtcggaaacttctccacaaacagacgctcagcttctccggtcagagtgtgtgtttgggagaggagggtctccctttcccgtgagtcttttctttttgactgggaaataagtatctcccaatcttcagtaaataggatctttgctctccttttcccactcctcttcttggcccattacaaagatatttaccaaacatgcttagcctttatattcttctgttaatattaattcttttatttaatatgattgagcttccactatgttcaaggtcctgggattttttaggcaactgtaatgcagtccttatctttgtggagctcatggttaaatgaggaagacagacaaaaataattatgatccaagatgctatgtgctaaaatatactggcctaaacaaagtattattgggagcatagaaataagagtctttgtctggtggtcttggaaataaatatctcaagagagaagttgacatttaaaatggttcttgaagagtgaatgagaatttcttctcagattaaggggtaatcaaatattttagttcatggtaacagaaataatgaaatgtgaagcatattctagtagtaaagaacagaagtgtgaaagaaatggccaaaaagttcagtgtggcttcaatagatggcctatgagattgtgaaagcattttgtcaagccagatatatatattttaaaacaccttataagcaatagaacactaatagagacttttaaactggggagtgaaatgcttttctgaaacataattttgggagcagcatggaggagggatggggaggagagagatcagtattgagaaggccagtcaagaggatgcttccacagataagggaagacatgaaaaaggtgtggattggcaatgggaatggagaaaaagaattgaatttaagagatattcatgagctggagtcaactggacttggtgaccaattggatgatgaaaatcagagagaggaagaaatgaggaagactctgaggttcctagggtcagactagtgactccctgaaaagacagggtttggatttggtgaatgaatacagtcacgtgccacttgacgatgggaatacattctgagaaatgtgtccttagtgattttgttgtgtgaacatcatcgagcgtactgacgcaatgatgtctactagatggcagagcctactgcactacctaggctatgtggagtagcctattgcttctaggctacaaacctgtacagcatgttactgtactgaatactgcaggccatggtagcacaatggtaaatatttgtgtaactaaacacataaaagggacattaaaaatttctgtattataatcttatgggaccgccaccatatatacagtccatcgttgaccaacatgtcatttatgcagcgcatgactgtactgagctcagtttggaaaggctatacatgatgtgttagggtaaaaccagatagtgatgttgaaaggaatttggaaacaaggaactagaagtttgggctggagagaaaatgtgggctcctgggggtagacatgagagctggagccataggtgcaaatgagttcaggcagtgaacaccctgtccatgtgcccaaggagttttgcacagtagctgagcaatggcaagcaatgtgggtattcagaggtgtggataaaatcctctctccctcccactctgtggaagagagttgggttcatttaatctcatatgatttccctagtacaatagtttcaaatcaaaggcaatgaagtaactaacaaaataacttgtttgtaaattaattgctttgtgaatattgatacaaagttttataataccactgggattttttcatttttcatgaagaaatcagttttaactaggagaaaatcaatctttcatttttcttattatacacacttagagaaccaaagggttgttttgtaccccctatggagttccttggagagtaaaacaatgcacacattgtgtgtgtgttcatgagcactcttttggctttttctcctcacttttcttcttcccattttttttttttgctttcttttttttttctccaaatgttaggcatttaggttagattgggtttatcttgtctatcctccctcccttccttgcctcaattacttctttagattatgggtgcctttgaatagcaatgtaagtttagaaatgatgcatatataaaaatctactaaccagggatctaaaggttttagctggtagactcataagacatgacattgcttttatgaaaggtgagaaaagtggtaggaagtactttttttttaaatgccagaatttcttagtaaaacatcaaatataactaaaacctaatataaacattgcaatttttagacttttgcctcttgtgtcacattcatgtgctgtgctaagctaacacttatcattgtttgattacagaaaatgtgtttaataagcactatcaatgattacaaactcaggacatcttatctttccatcactctgagacctttgtggaggtttgtggttacaagtctgagttaaagaaaataaaattacatttctgatatcttgcacgctctgcactgagtgggttctttaaatgtttcctccagaggattttcaaccaggaacaatacaactgcttgcaaagagtcccagcaggatgggtctgggcatgagcatcttatactggtgaaatgaagtagtccagatattaaaagcatcaacttgcaaatgaactcatctgcactatagtgcaattctcaggtgaatgaccttttcttcagaaattttcttaatagtcccccaaaagaagaagaaaatgttcttgtgctttataaattttgaaaacctaaagagatcacttaatataaagatttttattttactcttgaaaacattagtctattgatatcaacagtaatattataaaaattattattattattattttttgagacggagtcttgctctgttgccaggctggagtgcagtggtgcaatctcggctcactgcaacctctgactccctggttcaagcgattctcctgcctcagcctcctgagtagctgggattacaggcacacaccaccacgcccagctaatttttatattattagtagagacggagtttcaccatgttggccaggatggtctcaatctcttgacctcgtgatcctcctgcctcggcctcccaaagtgctgggattacagggcgagtcactgcgcccggcctataaaaattattgttagcagcagttaacagtcttgagcctctactgggaagaatatgccctgttagacacagtattctatgtgatgaagaaaatatagtacctgttctccagactgattataatctagggtttccaataaaaagtaaacagatatggtagcaaaacaaaacctcatgtttaatattcagattttaagactcatcaccaggatccaagaccacatattcctttttgtgattttagtaacatattaagtgctaaaagatataagatgatgtttatatcacaaaccactaacatgctgtgtttataaaacatcttggtatattagaacaaccattggtccaggggttcttgtcctggtcatatattgggcaaatgtaatggctgcgctttgggacatccaagtgagcaaccaggtttgttgctcacttggatggaacaaagttgtcctgccctccacagacatataagagccaagagaattatcaactgtctaaataagtatttatgaacccagtggatatttgaaggtaaagaaagtttttctttaaagctcagacagataatttccattagaacatgacatctcagttggggtagtgtcttgtatgcatgattgtgtatcttcatacacttgtttccagaagaaaagcaataatgtggcatagctaactctgggatcatgccccagctatgagctatgtaatcctgggcaagatagtcaccttttctggctctagtttaatttgataaatgcaaatggaaaatgcaaaatgaaaggtttaacttgtcatttctagaagcccttttggctcttatattataaatcctgtgcttcatctcctcagatttaaaatgtcaccgtctatatattcatttgttcgcccatccaaccatgctttcatccatccaataaatactgattgcagcttacaacacaccaggtattattgtagatacttgggatggatttgtgaataagaccaacaaggtccctggttttaaagcttagagtggagtagccagacaataaagaagaaaacaatcagataaaccagataatttcagacagtgataaatgctttatgtcagttaatgtactagataatgacctggatatattctttagattgggtggccagtggtcactgaagaagtgtcattactcttgaacgatgacaaagaagcagccatgtgaaaatcagagagaatgttctaggtggagaaatgagaaattaaaagccctgggaacctgctttgtgtgtttgaggaacagaaagaagggcagtgtgactgtggtgtagtgtgtgactggtataaaatggggagaggtaggagaggtcatgcaagtcatgggaaaccagggtaagaacttagattttactgtaagtggaatgagaagcacctggaggttttataagcagaacaatgactctattggattatgcatgtaagaaggtcattctggtttctctgtggagaatggattgtaaatgggcaggagtaaaagcagaagctcttgtagtcccagagagagatgacaatggtttggaccagttgaagctgagatggaggagaagtggatagattctgttggacataaaacagaggtgctggaaattaggcgttcttcctgctcacagatttttagcactggtcctgtaacactcagttgttagtgaccactgtctagcttcctgtggttgcctgcttctattatacttctgttgattgttgctagtgacactttgactgtggattgaaccaaaaatctttcatgcacccaggaagctgtgtgacctcgggcaaataatttaatctgtctgggccttcagttgtctgtatgtacacaaaagaggtcaccagatctgactgtgtatgatgctgagaagaggttgaatcatgttacaggaaacaaaaagtgtaaagctgagggtatttataggatgcctgaaacatgaagtgttgatgaaatttattagcaatggaaatggtatgttaggaagcatgaggagcatatcaaagatagtatgagagaggatgttttggagaagattttatattaaaggtggtatgggaagaaaaggcaaacatgagaaaaaggaagaaagaacaagaagagagagattggtaaggggaacactgacaatttttaactactggtatggcaacagaattgaccaaatagatttgacaccttaccaatcagagcagacactatctataaaagtggtgctatctatcataccagcattccaggctgagtattagacttggagataagaacatccaagaaggatggagaaaagatcctagatgcttttgcagttataagaaactaatgtattcagatcttccttaaattgtctatccattaaatgctttagtcatggttataaggggcagtctcctttaatactattttcaaatgttaccaaaggctaagaagaatttgtaatttgtcatttgagcattgtcttagtccattttctgttgctatcactgaataccggagactgggtaatttataaagaaaagaaatgtatttcttacagttctggaggctggggcctaagtctaggggtctaggggcctaggtctaggctgaggcctaggggcgaaatctggtgagggccttctttctggtggggacactcatcagaggcccaaggcagtacagaggattacatgatgaggaggttcttgagagacagccaatctggctgtttataacatactaactctcatgataattaacccactcctgtgataacctattaatctgttaacccattaacccatgaattggattaagctattcatgggggttctgccaatcatctcttaaaggccccacctcccaattctattacactggggattaattttcaatatgagtgtcagtcagagggggacaaacattcaagctatagcaagcatatctgttctatatctgccaaaatagttatgaaataattaattaaatgctatagttaaaaacattcgaactgcagacttagagctgtcaagcggttttccagatggaaagtttaaacactggatatgtggaaacctaagtcagccttctgatcactacatttcataataaataggcgatccaggtagtttttaagttaaagataaaaaaatgagtaattaagagcgtccaggccaggtgcggtggctcacgcttataatcccagcactttgggaggccaaggtgggcggatcgtgaggtaaagagatggagaccatcctggccaacacggtgaaaccctgtctctactaaaaatacaaaaattagctgagcatggtggcatgtgactgtagtcccagctacttgggaagctgaggcagcagaatcgcttgaacctaggaggcagaggttgcagtgagctgagattgcaccactgcactctagcctgctggtgacagaacaagactccatctcaaaaaaaaaaaaaagagtgtccaatagaaatgacactctgaaatcttcagctgatgtcagtggcacacactctcaacatgccattcaagaaaaattgaggcacggcattcctggtcctacctaaatacttttgtgggcaagaaagacagtctcctttattttaatttattctgactttctggaatagcccattatgatattgagacagaaagtggttaacaggaacattgttttccctttggaagacttacccaacagcaaagaattagctctctcagttgtttgcagtcttatctggatatattctgatgctgaatccagagaaagcaggtgttagaaataacattaagatgtttttgtttcacttcttcatttcacggatgaggaggctgaattccacaggggtaccctagccacagagccttgctagtggcagagccagaatttgcctctggtttccttgggatccactgcaatgcacttccaccacactgcaccgccaaccattcatgtcctcttgtgtttgccacagtgcgggcacaatgggggaaaaatctgctgagaaaatcatcttcggaagtagaagacaatgcgtctatgtctgtgtatacatggtgaccacagacgctttggctccaagatcattgtggtttacttgctgccattctaaagtctctgggaaattttttgtgaacatttctaaaggaactgagaacccgtccactgattttatcttctgcagcagacggtagagacatacgcatcaaagcaacagtggggcaacatatttcactgtcagacaaataaagccccaagcaaaataccctacgttttaatctaatgtagactgcacctgttctcatgccaacagtttttttttctttgcctctggataatattgttccttccagtttttaaaacgaagcaagtattattttccttctgtatgcttttaaacatacttgttattataaaacaaaacatacatatagaaaagtgaaaaaaatgtataatttaatgaataatgctaaagcatactatcttaccctcataatcaccacaggtcaagaaatacaagactgtcagcacccctatttccttctgattccaactctttctccctctttagacaaaaccattaggctgaattttgtgatactaattcagattatattaactatttctattttttagtaattatggaagaaatcaaaacatgtatacttcacttagaaaagtttcaaattacatataccttcactatctttctagacaatgtgctctatattgacagatgtttcttttagcacattggaggtatatgttataattccactgtatcagggcttttattgttgatgttgaaacagtctaatagttgctccttggaaggtaatcagtctcttttctctggctgcttttaggattttcactaagatacatctaggtgtgcatacttttaaaaaatatgcttgtgaattgttgggattcttgaatctgtggagtgtgactgggttctaactaatttttccaacctatctgctggttcaccaattttctctttaactctgtctaatatatattaaacttatctattgagttttaaatctcagtgcatttttttggccgattcttgtaggttctttttcaaattagttgacttaaattttcctgtgtactacagatattattacaagtttttctcttatttgcttaaacataataagcttaattactttattttggggacctgataattcaggtatataaatcatgagtttgtttttgtagtttgttgtttctgttgttcccttgttttcttgtatgtctcattatttttgtgatgtgtttgccattgaatgtgaatattatttgtatgaaattttttgaggcctaggatgtaaaccttttcttcttgtaatagtttgcatttttactttcaaaagctgaagggtaataataatgcaaatctccttaaagaaaattcaaggattgaggttttctaaccattgaagtccagaagatttttctggaccatctaatctgaatgaggtctggtttatttctttacctgtgctccaagaatgtaactctttggggtcccaatttattggggagagggttttctgctagatcactcactctgcagattctgggagttgagacataaaaacaaaagtttgaatttgaaagaacagcaatgctttccgagtaaaagcagcttccaagctttgcctgtctctcggggttctggttctctcttcaaatttagcctggtaatttctcctcctttgtgtcattctttaatgcttttaataatatttttggacatttgttcaacatttttggttgttttggcgtgagaattagtttgaataatagggactgctataactgaagactagaacacttgtgcttattttcacaatcaaatcacccaaattgaagatatatagggaaaatataaattgaagcccagggtcattaagaaaataagtaattgtgtatcttaaataaaattaaggcaactagtgtaagtagaggtgtgacaaatagcccctcctgcataatgctaatcctgttacaaatttcagaaagcaaaatggcaatacatagtattataacttttaaacattttgaccaaatgtcataatatttacataaaagcaaaatgctgaaaataatcccaatatccaacgttagtattttagttttaacaaattatgatagattaacattttggccaataatatagtcattaaaaaggataattatgatgactaaaaatgaaatgtttatgacataaaataacaatagcagaacacaaaataacatgtttgctataaataataagtatgtttttgcaagataaagagcaaaaatatacaaatagtatttctatttcactgtagaactaggtaatttttttccttaaaatttttttacacttacatagttttctcaaaaacaaagaccaagatttcaaaacttaggaaaaaaccagcatactaataattttcccaaacaatttcagcatgaaaatttgtcatattaaaaaggaaaataaaacaaaaagaaagagaaggcaatgagcagtttgaatttatagtctaataactcagaatctgcaaccaccaggccaaggtgatttcagttttttccttctgtgattcccatgtagcttgcaaaaacaaccatggcttcctataagcataaatttatttcagaaaatgaaaaagtggggctgggcatggtggttcacgtctgtaatcctagcactttaagaggctgaggcaggaggattgcttgaggccaggagttcaagaccagcctgggcaacatagcaagacctgtctctacaaaatttctttttcaaagttagccagatatggtggtgtgtgcctgtattcccagcttcttgggaggctgaggcaggagggtcccttgagtcaaggaagtggaggctacaacgagctaggatcatgccactgcactgtagcctggggaacagagtaaacccttttctctgaaaagaaaagaaaagaaaagaaagagagagaaaaagtaaacaaaaatctggggctttatctttattatcaggccttgattcagttctcagtggatgaggtttggagaaaatacatttctgtcatttgaaaatgattagtctgttcttttactctttagcaggaggacataatgtatgtgtgtatatatgtatgtatatgtatacaattatttgtatatatacacacacatagtctctctatattgtaatatacatatacatataatacatatattttaatatataatatgtaatatacatacatatataaaatatatatacaattattcatttttaaactacttcgtacttttacaaagtgagcaatttctatctttccttttatctgctttactgatgtacatcagtgattatttactcatcagaagtacacatggttcttgtcagagtagtttgatcaacaggtagacaattccttctccccaagatatacctactaataaatgaagtttttcctaaacttcaacttttcccatatctctctgtttagctaagtgctactaatcctttaattccaattttaaaactcacttcctcaaggcggcattttctgattctataatcaaaattataacccacctgactctaccaccttcatttaaatagtactccattcctatcacaaattatgttgcattactacatatttattcctttaccatctgcctccaatatgaaagctaccaaaggacagaggccataccagtttgattcatacacactatgtaaatatattatttaatatttagtatattctatattcacatatgacaagcaagtttctggttaggatttttttttctctaggacatagttttatcttatgttcttccttgaggggtggagggagaatgtgaagctgtttcattttggtgcaacagagatgactttatgcattgaataaattgcttttatgttaaaatataattattagggcaacattataaaatgtcacttttgctttgttttctttctttttatgcaggagaaatcaatggttctgccaattatgagatgtttatatttcacaacggaggtgtacaaattttatgcaaatatcctgacattgtccagcaatttaaaatgcagttgctgaaaggggggcaaatactctgcgatctcactaagacaaaaggaagtggaaacacagtgtccattaagagtctgaaattctgccattctcagttatccaacaacagtgtctctttttttctatacaacttggaccattctcatgccaactattacttctgcaacctatcaatttttgatcctcctccttttaaagtaactcttacaggaggatatttgcatatttatggtaagacattgctttcatcttccaaacttaagagtatatatatgttttgacaacttttctcactaataaaatcaattagacaaataaatatcttttgtgttggagttcacttagatgcagttgatggtaatcatttataatgaagatatacaggtgatgatttactattaatcataattagtattattcagcaatatgcaatgtaatcccatagactgctaagtcagaaatagatcatattgccttttaaacacatatgctattaaaaatcaggaaaaacattaagacaaatacttaaacttatggcttaataatgggtattatctctattcacctaagatttaaggtttggttttgcactgtgtttgtggaatgaagtatgatgattgaaaatcatagttttataacattacttttactattacctcttttataaaaatataggcagaaaagccctttctattaaccacatttgtaaatacattatatgcataatcttttaagttttagttcctggatccttgccataatactgagatgatgttagtctaataacttgcccacttactggatttcatgactataataaagaaaagcttcatttgattaaatagctcttttaaatttggtaagagaacttgtggttcagcagaatttttcattaacatacctttttttccaatccagaatcacaactttgttgccagctgaagttctggttacccataggatgtgcagcctttgttgtagtctgcattttgggatgcatacttatttgttggcttacaaaaaaggtaagcgatttctatctttccttgtatctgctttacagatgcacatcagtgattatttcctcatcaaaagtacacatggctcttgtcagagtaatttgaccaacagggagacaattccttccccccaagacatacctactaattaaactaatcacttggaacagaaatttatgtatttgttttatagcccacacattccaaagaggacttgacttgatggcttacagagagttacattattattattattgttcaaactagatgaggaaattgaggtcaagagaagactaaaggtcaggaggaaggttaaaacatcaaaatagatgactctgatttttaaaaaattattatgcatgggctgcgaatttgaatccaaggttcctgagaggcagggcagagatgaaacaattagttataagttttgcttagctggtaagttaaaaacagtcagcaagaaagccttctaaggtgtcaattgtagctgagaaggaaattgacaacttttttacatggtaggttattagactccttgcttttaaagaaaaccactgaggagctatttagaaagataaacaacaatgacaacaacaaaaatctccctgtgctgggggatattctttttggtctcttgcattacaggttctcaatcaaagaactgacaccactctgcatattacgcgagtatgctagtactcaagtatatccacagtgtggtcattggccagtgtatatctgtgggagagtggaatttggaaagagacataaagaaggaagagaatgagatagcgcccatggtctaagtctgctgggaaagaaacaataaaggcaaaaacgaggaagaaagttcagtagaaagctctttttatgtaaagcccttttcatattgtttttctacttagcctaaagccaggaacctaagtcacattatcatgtttttgtcacataccacttcaacaaagaatagaaaacagtcaaaaaacaaagagatggagaagaaaagatgaccaagcatgtttctggctttttctttcagaagtattcatccagtgtgcacgaccctaacggtgaatacatgttcatgagagcagtgaacacagccaaaaaatctagactcacaggtatgactccatttgggggtttgggaagggaagaggtttcttcacagtaagcctggaatgttaatttttttttttttaattttaaaggaaaggaaaacatctccaaggcctaattctagaattttctgtgaaaatctggatttctcacttttaactagatttatattttctgcagtatattgaaaacaaacaagcaataggtttgtaagccactattgaaactaaacacacaaacagctcataaaccaccatagtatcaaggcaattttcccattgatgtttcaaaagttgggatgattctaagtgttttttgttgaagggttcattcagtcattcaatgagcgtttattgagcatcagttaagtgtgagttactgagtgaggcactctggggaatttggacagatatatgctaattttggactgagattaggaagagagatctgtgctggtactgctagagggaagaaggagaaattgatgaagatatctggttattttgaggtaaagagtgtgcaagtttagagaacttggatggctttagaagtctcagtaacatggaaatttgaccttttctgttaagagtcagaaaactgaaagttgccaagtttgaggagcacccagaaagtttgaagcttccattgtggaaaattcatgtcttatgcccttgaggttcgaatgatgtgcgatgtgtaatgagacagaagccactgcatttttccacccctcagtggctacagattatctaaaggggacacacatagcttgcgttgtcatggaattatagcatgggatgggagctaaaaaggatccttgagttcacatttcatgttttagatgacagaaattgatgctcaaagtgttcagtgactcttttggttccctagacagttaatacctagctttgacacttgcaaagagcttatgtttcattactttgctgtttaaaaaatatatgatctctcaatctctttgcttaatgtgttctggctgtttggatccccacaagcagaacctgacataaggacttgggtgcaagtagtttatttgggaggtgatcccaggaagaaggggtgagggggcagggagagtgagacagccaacaaggagaagcaaatgaagggcgcattattatcaaggtctcagctccaggccacagaggcctgacttcattggacctctgagaagtgtacagatgcctcccagaatcattctcttgaaggatggcaaccactggctccatcctcactgatttggggttgcctgcggagggcattagctttccctcatctctgagctgtgcctctacttgggatgagcctacttgggatgagtcttcagagaaagtctggaggcagaaaagcagtgaaatgcagtggggctgttgtgctagaacagtcagcccatgcagcgctttctgccccagcagcagctgcaatcagaggtggacagtttcaaagtgatgagtttagataatgtctgttataggagtcgagagctaaacttctctggaaatggggaactggtgctgggtgttgaagcataaagatgagtttgcatggtgtgtgtgtgagtgtgtgtgtgtgtgtgtgtgtgcacgtgtgtgtttgtgtgtatgaaaggcaatggagaggggaaagcttcttgtagggaactggcacatggagagcatttagataatttatgctgaatttttgttacagatgtgaccctataatatggaactctggcacccaggcatgaagcacgttggccagttttcctcaacttgaagtgcaagattctcttatttccgggaccacggagagtctgacttaactacatacatcttctgctggtgttttgttcaatctggaagaatgactgtatcagtcaatggggattttaacagactgccttggtactgccgagtcctctcaaaacaaacaccctcttgcaaccagctttggagaaagcccagctcctgtgtgctcactgggagtggaatccctgtctccacatctgctcctagcagtgcatcagccagtaaaacaaacacatttacaagaaaaatgttttaaagatgccaggggtactgaatctgcaaagcaaatgagcagccaaggaccagcatctgtccgcatttcactatcatactacctcttctttctgtagggatgagaattcctcttttaatcagtcaagggagatgcttcaaagctggagctattttatttctgagatgttgatgtgaactgtacattagtacatactcagtactctccttcaattgctgaaccccagttgaccattttaccaagactttagatgctttcttgtgccctcaattttctttttaaaaatacttctacatgactgcttgacagcccaacagccactctcaatagagagctatgtcttacattctttcctctgctgctcaatagttttatatatctatgcatacatatatacacacatatgtatataaaattcataatgaatatatttgcctatattctccctacaagaatatttttgctccagaaagacatgttcttttctcaaattcagttaaaatggtttactttgttcaagttagtggtaggaaacattgcccggaattgaaagcaaatttattttattatcctattttctaccattatctatgttttcatggtgctattaattacaagtttagttctttttgtagatcatattaaaattgcaaacaaaatcatctttaatgggccagcattctcatggggtagagcagaatattcatttagcctgaaagctgcagttactataggttgctgtcagactatacccatggtgcctctgggcttgacaggtcaaaatggtccccatcagcctggagcagccctccagacctgggtggaattccagggttgagagactcccctgagccagaggccactaggtattcttgctcccagaggctgaagtcaccctgggaatcacagtggtctacctgcattcataattccaggatctgtgaagagcacatatgtgtcagggcacaattccctctcataaaaaccacacagcctggaaattggccctggcccttcaagatagccttctttagaatatgatttggctagaaagattcttaaatatgtggaatatgattattcttagctggaatattttctctacttcctgtctgcatgcccaaggcttctgaagcagccaatgtcgatgcaacaacatttgtaactttaggtaaactgggattatgttgtagtttaacattttgtaactgtgtgcttatagtttacaagtgagacccgatatgtcattatgcatacttatattatcttaagcatgtgtaatgctggatgtgtacagtacagtactgaacttgtaatttgaatctagtatggtgttctgttttcagctgacttggacaacctgactggctttgcacaggtgttccctgagttgtttgcaggtttctgtgtgtggggtggggtatggggaggagaaccttcatggtggcccacctggcctggttgtccaagctgtgcctcgacacatcctcatccccagcatgggacacctcaagatgaataataattcacaaaatttctgtgaaatcaaatccagttttaagaggagccacttatcaaagagattttaacagtagtaagaaggcaaagaataaacatttgatattcagcaactg

SEQ ID NO: 1754 - DNA, 2609 bp, Homo sapiens
ctgaacgcgaggactgttaactgtttctggcaaacatgaagtcaggcctctggtatttctttctcttctgcttgcgcattaaagttttaacaggagaaatcaatggttctgccaattatgagatgtttatatttcacaacggaggtgtacaaattttatgcaaatatcctgacattgtccagcaatttaaaatgcagttgctgaaaggggggcaaatactctgcgatctcactaagacaaaaggaagtggaaacacagtgtccattaagagtctgaaattctgccattctcagttatccaacaacagtgtctctttttttctatacaacttggaccattctcatgccaactattacttctgcaacctatcaatttttgatcctcctccttttaaagtaactcttacaggaggatatttgcatatttatgaatcacaactttgttgccagctgaagttctggttacccataggatgtgcagcctttgttgtagtctgcattttgggatgcatacttatttgttggcttacaaaaaagaagtattcatccagtgtgcacgaccctaacggtgaatacatgttcatgagagcagtgaacacagccaaaaaatctagactcacagatgtgaccctataatatggaactctggcacccaggcatgaagcacgttggccagttttcctcaacttgaagtgcaagattctcttatttccgggaccacggagagtctgacttaactacatacatcttctgctggtgttttgttcaatctggaagaatgactgtatcagtcaatggggattttaacagactgccttggtactgccgagtcctctcaaaacaaacaccctcttgcaaccagctttggagaaagcccagctcctgtgtgctcactgggagtggaatccctgtctccacatctgctcctagcagtgcatcagccagtaaaacaaacacatttacaagaaaaatgttttaaagatgccaggggtactgaatctgcaaagcaaatgagcagccaaggaccagcatctgtccgcatttcactatcatactacctcttctttctgtagggatgagaattcctcttttaatcagtcaagggagatgcttcaaagctggagctattttatttctgagatgttgatgtgaactgtacattagtacatactcagtactctccttcaattgctgaaccccagttgaccattttaccaagactttagatgctttcttgtgccctcaattttctttttaaaaatacttctacatgactgcttgacagcccaacagccactctcaatagagagctatgtcttacattctttcctctgctgctcaatagttttatatatctatgcatacatatatacacacatatgtatataaaattcataatgaatatatttgcctatattctccctacaagaatatttttgctccagaaagacatgttcttttctcaaattcagttaaaatggtttactttgttcaagttagtggtaggaaacattgcccggaattgaaagcaaatttattttattatcctattttctaccattatctatgttttcatggtgctattaattacaagtttagttctttttgtagatcatattaaaattgcaaacaaaatcatctttaatgggccagcattctcatggggtagagcagaatattcatttagcctgaaagctgcagttactataggttgctgtcagactatacccatggtgcctctgggcttgacaggtcaaaatggtccccatcagcctggagcagccctccagacctgggtggaattccagggttgagagactcccctgagccagaggccactaggtattcttgctcccagaggctgaagtcaccctgggaatcacagtggtctacctgcattcataattccaggatctgtgaagagcacatatgtgtcagggcacaattccctctcataaaaaccacacagcctggaaattggccctggcccttcaagatagccttctttagaatatgatttggctagaaagattcttaaatatgtggaatatgattattcttagctggaatattttctctacttcctgtctgcatgcccaaggcttctgaagcagccaatgtcgatgcaacaacatttgtaactttaggtaaactgggattatgttgtagtttaacattttgtaactgtgtgcttatagtttacaagtgagacccgatatgtcattatgcatacttatattatcttaagcatgtgtaatgctggatgtgtacagtacagtactgaacttgtaatttgaatctagtatggtgttctgttttcagctgacttggacaacctgactggctttgcacaggtgttccctgagttgtttgcaggtttctgtgtgtggggtggggtatggggaggagaaccttcatggtggcccacctggcctggttgtccaagctgtgcctcgacacatcctcatccccagcatgggacacctcaagatgaataataattcacaaaatttctgtgaaatcaaatccagttttaagaggagccacttatcaaagagattttaacagtagtaagaaggcaaagaataaacatttgatattcagcaactg

SEQ ID NO: 1755 - protein, 199 aa, Homo sapiens
MKSGLWYFFLFCLRIKVLTGEINGSANYEMFIFHNGGVQILCKYPDIVQQFKMQLLKGGQILCDLTKTKGSGNTVSIKSLKFCHSQLSNNSVSFFLYNLDHSHANYYFCNLSIFDPPPFKVTLTGGYLHIYESQLCCQLKFWLPIGCAAFVVVCILGCILICWLTKKKYSSSVHDPNGEYMFMRAVNTAKKSRLTDVTL

SEQ ID NO: 1756 - DNA, 13407 bp, Mus musculus
tgatttcttctctccagcgagctccgcagaagacacaggcgctggttgctgggtccgctctccgcctccgccgcgccctcctcgcccgggatgggcccccccgccgccaccgccgccggagccctagtctccgggccgccgcctcggtcgccgcgtttgccctgaagcccggtgcccgcgcgccccggctcaccccgcagcttcactccccacccccagccgcctccccggccagactgcggtagagctctcaggatgctgccgccggtgccctcccgcctcggactgctgctgctgctcttgtgccccgcgcacgtcgatggactgtggtggtgagtgctgagtgggactgtctcccgcgcagctccaaacaccagagggtggggacccagagccagtcttgggacttggcacagcgatcctgctgccttcaggctctacccgctccaggatcccagctatcgggaggttgcaccgggaccctcgcagacagttcctttcgggtctctgcccgagcacttctgaagtgccactttgacgttctgtacccctggatactctattgtgttttcttcccgtatagtcttccttcccccaaagaaatgtgtccaattcgcatcatcaaggagttggcagataggtagggaagagctgttggacatcatgaaatccatagtgagagattgggtgagaacggggtgaggaggggtggggacgggcgagaagggccctcgagctagatttggggaacagacaggaacaaggtggaaagctctaagacagagagagtcaaacggctgcctcttgcccgcgcctcattgcctaccacctcaccattgctggccccttcagcattggcagtagtacaggaatagggaatgcaaatggggaaactgagtcaggactctgacttctctgcttttcccatagcgagtaagaaagacagaggggagatcccggaggccctctcttccagaactgggaagtaaggaatttttttttttttttaatgtgtagcggaggaggtgtaggaactcttgagagcgatctgatgaagccagtaggagcctggccagccgagagatggggtaaattctcagatccgaactctgggatttagccagagcagacacctagacttcgagggtttccaaagctttgagccttgaggggaaggacagaggaggggcagcgggggtggggggcgccaggacaactcagatccaaatcttcaagacttttttcctcttagttttttagagccacaaacacccgcccggaatagttcagtgttcagagaggaggaggagggatttgggcaagagtgctgatagattagccaaccctaagaaagcaaggacttctacatttgcatatagccccgccattggctgaatttctaccctctcagccctctcacccgccttcgcggctttggacccaggggtggggcaggcccatccctctcttcaacagagattgagtactatgcccacacaggaagctgctggccgctatccttccgcgacgcgggaaagacatcctcgtgggtgtcagtgagagggctaatacaagatccaggttcgggttaggaaacatgcgccttgagttcttgctgcaacgcagtatttagcagttttgacagatgtatctaatcccagtttaatctgtggtcttgggtgaatcattttcccaccttgacctacaaactctcagcttttaaagaacaatctccctatgtggcaggcttgccaggagggctgtgggggaagatctataaaatgatctgacattaggagccctcttcccagtccagcctctcatctcccaggtctccttaggatgaaaagtggggttactttcaattcaaaataaagagtaaaaaataaaaataaagtaatgtttggccgtgagctcgctcgctctctctcctcccacttacacacctttcataattttgccccttttcaatatgtaggacagtgctatcctttctctctcgttcttcctcccccattggtctaaattgttctttcttacaattaaaatcccacttcctccatgaagctgtcattctccccaccaccaccaccctgtccttgaggctcccattatgccctaagcaactatgcatttaccgcactttactgacaattgtcttctctggaatgtttttgccctgttcctggaaggcaaagcctttgtctggagagccctagaagccccggttagtctaggtgctggacacaggtttatggagtgttgctttctggatttgtatctgtgaagatccctttgttcaggaaggactgctgggtgggagccaagccaacggcagaggggcctgggccctccggagactgaccctgaggcttcgaatctgggagtgggggaggaggtgaggagggcaggtgtgggagaacacaggggccttcatggccacagctgcagtgaagagtgagaggccagggtgataagatgaccagcgaatgcttctctcagatgtgtctccgagagaacctgctcctcccacctgcctcggcccctctctgtctatttctgacacttaattcctttggtctgagcccaggctgactttcacatggtctttgcctctctgctgatgctgctgtcctaacgtaggcctcctggtatgggctagcgggtagatcgtgttgggtggttagcttgaagttcttgacattttctaccctacctcctccctgttagagctgggttcttcaggactggggttcaggccctgcatcactgaccaccttctttcccttccttctcaggatgatggccaggccagaaactccatgggtggtcagcaaagcagtgtgatctatggcagccatttccacaatctagctgtggtcaggataggggccaagaggactccagggcctctgagtgacttgactgcccaggtcactaaaagaaggtcctggagagtggcccaggccttggattcgctcagggaccaggctgctggttccaaagaagtttttctttcacctttcttttccactccacctcctcccagtgcaacgcaagatttctatttttaatttttcttgtttagttttgagacagggtcttgctatgtagcaaatgcatgccttctaaactctgccgccagcctctgtgtatttctccaatgtaaccatatctttgtgaatcacagaatccaagattccaggacactggccaggccctcttgaggtcatcttgttcagcccctgcctccaggctgtccaacctatgcaagaatcctgtccagagaacgaagcaggaaagagactctggctcccaggtcaccagctcaccctcctcctctgctccctgctcccctctccacgtttggtccatcaaaagccaaatagatcatctcccttctctcttcctcttccctctcgatgttttacctttcctgtgaaagaaacgtatctgcccccccccagcccctgtccactaggaagaagccgcctaatctgcccctagccatcccactttgtctcccccccttatggaaaagaagccagagctaaaggttaaggacagcctcactgctgaccccacagggagacaggaaaaagaccagacttcttcctgatgctcaggttttctagttactctctgccgtacctttgtgtgttcacgttggtcctggtcgctaggccattctgtcttgatctggggctcctgacccttcctggtcaatgctgatgctggctctcatcaagccctagagtagggatggcttgggggtggggtagctatccaatcccttcccaggcctcactcagccttggcagcttccccttcagagagacaatgaggctgtgagcagaaaagggcaggggcaaaaggaggctggcttgatcccggccagagcatgccctgggcccaccagagtcctggcactgtgacatttcctggggggtgaggctcccttctgccccattctcatctgaagccaggagttggtggctggaggtcagagggaggccccatcaccagggcccagcaagggggattccagaatgtgtactttgatggggaagtgcagctgtggagggaatggggcagggcagcaaccagcccaggccagccagcaggaggcctcgggaaccagatgcccgctctctgcagactggggagagcgccccctagcccggtattttttttttcctggtcagctgggagcgtgtgaagagaactgtggccaggggaggcatctttggctggttctatgagctctgaggtctctgtttaatctagaatttgatctggaaaggactgagacataacctagtctgttatggtcactggtgagtgtagaagatccagggacaggaggggacttgcccagtgctaagtctgcgtgttgggagacagtggggctgagtcctgctccttttcagtgtgtggtgagaatgggaatctatccggatgagggccagggcctgcacaggtcccattgctctccatcagacaggtgctcttcattctacatgcaagagcagaaggtagggcaactgcccactaggtgtccagtggacagcattgttcccagagctttggccagtgggaaacccttttgcccagtgaggtctgtctgggaggagaagccctgcctcttggaaaaacaaacaaacaaacaaacaaacaaacaaacaaacaaacgagacagaagtgagagggacgacacagaaaaccaaatctctcctgtgtgaggaaggggaatgggggccacaggtgggcagtggtgaggcaggggttaatggagctggggcatcactggctttgatgtggtggtttgggactggggtagggactgggggaggggagcagtaattaccgagttaggagttagacagagcaggacaggacaggcgggcgggcacaggcccggcagcctcagcagccgtcaggcaacattttttctgccccctttccaccatccacctcccccacccccaccccctcccacccacagccccagggctcagagctccctctgctggctcctaggaggtggggtcaatggaagtatcttgggggtgggggtgggtaaggagttagggcagggagagagaggcaggcatgcttgctgtgaggttttccaaggaggtgaagaagcactcacgtggtgggtggtccctttggcctcagtgagccagctggactaggtgagggtcctagagggtgttctggtccctcggtaggctgaactgagaaggagacctagatccggactggacagaaaagacaagagtattggagaaagaacattcttgggactccacacataccaccaacatccttactgttaggcctgcatgagcaggcctgggaatacaagcacttgctaggatccactttctgtgtaggccgttatatgtggagggagggtattatcgtttccaccttcccattgaggaactggagtttaacttttatcatccacccaacaagtattaagtatgtttcacgtgctaggggctcactccatagcacacaagcaaatggcagaccccagatccatccccagcctgcatccctaaaaccctgagtgtgctccaccgatgatgacacgatacccatgtgtgagattcctgtctttaatgagacttctacctaattgtggagatgacaaggaatcatgggggcagggcacactcaaatgggtgacaactggagaatgctgctggggccaggctggtgctcctgaggacaagcgagggcaactggttggggatgtctggatgacttacagttgcagagtctagaaatgtagaggtgtggccagggatggcgtcaaaggcatgacagcaggggtgcactgtgtggaacacattgtgagaggccacctggggtcttcctgtgattcaggccaccatttccttctagccctgctttgggatttatcatttgatttgaataggactggagattgagcccacagcctcaagcatgccaggcaagcatcctatgactgaacttattaattttgagataggggtcttagtaagtttcccagacagtctttgagtttgcaatcctcctacctcagcttcttgagtagctgcaattacagatgtgtgccaccaactcaacccctgttggtagatgtttgtcattgagacgtggtcttaccttatagacctggctggcctaaaacttgctatatagaccacggcctgcttctggcatccaagggttggggtgaaagctggatgcaactatgttgggctctacttagattttaaaattacctgacttgctttgcaaggaggaatctctccagcaagaggccatcagcttcacacacgtggctcacctgtgtgaccctgaggtggctctggcgaatgagcaggtctctgacattttcttctgctctccgaatccaaaggtagaagaataactgaggcagaatcttggagtctctggggctcagatctatacacattgccagtaggaactgtctggcctctgatgccatcttatagaccattgacccatcagccatagtccttgagagaaaattctcagtgtaagtcacaacagttaaaatggccttgtaggcttgtcccttcctgtctgtgtactgagttcttttagggctagccatgttttctgtgcctagaagtgcaatgtgattatatcccacggcctacatagtatatctattccccactctcacatagtctaggcttcaaaaatacaaattagacaaattgccctaaaagtcttctctagactgaccccaggtcaacactaatccagactcccccaaagcagagctcattgtataaggaaacaaaagggcaggaagcaaagcaaaagagagggcatgggagaagagggcggagggagttgttctagaagtgaagtcagatcttaccacttggaggagaacacttgcatcaactcatgtctctctctctctttttctcctgaagcccagagaggaaactgactggtttggaatggctcagcccacccagaactgacaaaaactagggtcagaggtagggctgggtagtttgctcaaagcccctgtcatgtcttttctggagtttcattttctatgtatttaggatgggagtaaggacagggggcaggaacaagctggtcccttgggattctagtgttatctctgcccatccctcctcctgaccagctggtcaacagggcgatttcccaggaagtcagccagccccttaaccctgtgaagggccagccccacctcctgggggccctgtcctgcgtatcccatggttcctttcctatctctaacccctaggaagcagacaaggtcaagagggttctgcagttcttccttgcacgccccaaactcttttctgctttgctaggggaggggatggggtggggcagagtgaccttgggaagataagtccagtcaaccttgggaaagtagggagtgtgcagagggcagggatgggatgggggtggagctggggaacttagcagtaggagatgaggaaggcaaattttcagaaaccctcacagtcaggaggagctaaagcttgtaggtggtagaagggacactgaatgactgcagagaggcctgcttggttcctctcatctcagcgggaaggcggggagggggaaggtttgaggatatgacactaggagtcaggaaatgacaccaggtcaatgggacctggactcaaggggaggccttgtgactcactcattcagaaacatatgttaagtaatcattgttattacatatttgtatttatctataatgtagaattcatgatatgcaaattttcagaataaacattgcatggatatgaattggatactcagagagtttccagggaagatgaaggaggaagaggaggaggaagaggaggagaaagaagaagaaggaggaggaggagaaggagaagaagaaggaggaggaggaggaggaggaggaggagaagaagaagaagaagaagaagaagaagaagaagaagaagaagaagaagaagaaggaaggaaggaggagaagaagaagaaagaaggagaagaaggagaagaagaaggagaagaagaaggaggagaagaagaagaaggaggaggaggaggaggaggaggaggagaagaagaagaagaagaagaagaagaagaagaagaagaagaagaagaagaagaagaagaagaagaagaagaagaagaagaagatgatttccacaatgagggagctcaacattatctaccttccctgaacaaccacgccggaagccactcaaatccaaatcctttttaaatgaggtggctaagtgacagatttattaatgaagttgtacatagacagagaagtctaagttctttctgcagtgcagttttcagtttagattctagtaatgtggagacaccacgcagaatggaaaagaagcagtgtctctgtcagttgggagtgggatagacagggaggtggatgaacagagagagaccgagcagttcctgggccactgggccactgggccactgggccactgggcagtttgggcctggcctgggctcactgtccattactccatcagtcccttctctggggctgagagagggttagggctagtgttgggcagagcccaggctcagtacaaaggaacctctgccgtacagttctgctgagaaaggacacttgatccctgaactacttaagtagggataacggcaacttaaccccccatcttgtctgtgtgtgtctgtgtgtgtgtgtgtgtgtgtgtaaagagagagatctgtttaaaacaacaacaacaacaacaaccaccccccaggcttccatatctttctgcaaatacctccttgaacacaccatcttcagtgttgagagttttaccttaagacctaaattcctcttgctgctatttaagaccattgcatctcaggacatgcctgggcagcctgtacttgtggagtaaatggggacagtggggcggatatgcgaggaagcaaaactgaaaagtaggccaccctgacctttcacactcctttgccaacattttcctccacatagtataccccactgcctccctgtgtgcctccccgcctccctctgtctttctctgctctcctcagaaggggtttgaatggtctcagattaacctccctacctctgcccacacatcccttccagcctgagctctcagctatgttcaaataggagccatctgattcaggcggttccccccaggtgtgaattcctggctgacaacctatggaaaccaagtggcagctctctcctcaggtggaatgaaagtgggcaggggagaaaggctgctgacagtgtgcagaactttccctcgggtctttactcaccaaaccaaacatcaccccccttccattccccttttggttatgtcaccccagcacacagggcttggcttggcgccatctctctctgggaaagccagctaccctggaaagcagggtcagcaccacctatttgccaacagtactgaggaactaagatcccagatccttcttccagctggctagcccagggaaacaggggtcgcaggagaaaagagcccacctcagccgtctaagataaattttctcagtttacagaaatggttgaactaagaggggtgtggctttgaggggcgtggcttctttgaagggctgtgttccctagacattctaacacctcactgctcttttgtcccttagatggccattgctttttactgtaggttgcagcccaccaaggccaaatccttccttgatactgtctactttcctttagaatattctcttttatgaaatgtgctttttttttcagctttcttgaacttctgctaatttcttccttgtctccctttcgggctaggcttgttgaattttaaccttggcctcccttgcaccagctgccttcaccttgagtgatgttcctgtaagagtttattaattaagatgtgcagagaaggataagactggattcttgacataatgcaattttcagtctagaccttagtaaagaggggacacagacatggaatggaaagaggaccagagggacgccatcagtctcagttgggagtagggaaagactcctgcagcatgggccgagtggggctacctcttcttcaccccacccgcgcgccttgcatcttttgtgtttggggaggtgcacttctgacctgaagttctgcttcccagggccgtgggcagccccttggtcatggatcctaccagcatctgcaggaaggccaggcggctggcaggaagacaggccgagctgtgccaggcggagccggaagtagtggcagagcttgcccgaggcgcaagactgggggttcgagaatgtcagttccagttccgtttccgacgctggaactgctccagccacagcaaggcctttgggcgcgtcctgcagcagggttagtgtgggagaggccccagagggaggtgctttctccttgcgagggaaggagtttgggggaggttgtttgaactccatctcctgatttgcccctaggcaccctacccactttgcccctccacacctgcctggagtctgtctcccaggtggtccagcacagacctggaggggggatcccagttcccacctatggtaccgggcagtcactggcttccactcccttctccctccgcagacatccgagagacagctttcgtgtttgcaatcaccgcagctggtgccagccacgcggtcactcaagcctgttccatgggagagctcctacagtgtggttgtcaggcaccccgcgggcgggcaccgcctaggccctccggccttctgggcactcctggacctccaggaccaactggctctccagatgctagcgcagcctgggagtggggaggctgcggagacgatgtggacttcggggatgagaagtcaagactctttatggatgcgcagcacaagcggggccgtggagatatccgtgcattggtgcaactgcacaacaacgaggcgggcaggctggtgcgtatgggcagaagaagcaggcgttatgcatgcgtgtggaagtgtggatgtgcaagagagtgtgagcgtggtagcgtgggcacaagtaaaggtgtgaatgtcagagtgtgtcagcgtgtgtcgcgcggtgagcaagacaggggcaatttgggaaggctggggcgggcacacagatatacgtggcatgtgagatgtccagtggaggactgggagcttgacctgcagctgagaggaacagtgagcagagtggccaaaggacatttctagaatggtgctgagggccaatagagacccaaggtggggtgggcatcccattacagtggggtaacccttggggctggtagagaggtggatgtcaggacagaagcagtgtactgagacagggcctagggatggaattaagaatagatgctatggaacggtctgtagtctggtggtagaggtactagaaaaagtggaggttagagccagctctaggagaactgacttggaaaggacctgaaggaccaggagtccagtgagaagtcagtagaagcgaggataactcaggtccagcctcagtccagcaagcaaagaagactatgagagtctgttctccatagtgcagtcaagtggactctcctatatcccacatctcagttctagagtagttaaggaatagcacttcacactttctgtgtcctttagggttcaacctaagaatcaggcaaacggggaggagggggccgggagaggaatgtccggacaggcccacatacctgtagagaggattggggaggggtgacagagacagacgcccaggggtggggtggggggctggctgtgtctgctcagctctggctgggccgccaggggctggaatgaggaggccgggttggcaggagggttaggccgcgacagctgccacttcttcgcactccagggagaatggagaatctcaccactgcgtccattctattccctcccgctccctggcttccgaccctgcgatctctgctctatctactgttccctctctcactcctccatccttgtcatttttcctcctttctgagtggttcttttcttgatttcctctttctaaacttgtatttgcctgtcctctctccttccttctctctttctttccttccttcttcgcttgcttgctcgaccccctcccctccccggcttcctttgcgttttgtctgttccccgccgctctccgccccgcccattgccccgcccttctgctcccgcaggcggtgcggagtcacacgcgcaccgagtgtaagtgccatgggctttcgggttcctgcgctctgcgcacctgctggcagaagctgcctccgttccgcgaggtgggcgcacggctgctggagcgcttccacggcgcctcgcgcgtcatgggcaccaacgacggcaaagctctgctgcctgcggtccgcacactcaagcctcccggacgagcggatctcctctacgcagccgattcacccgacttctgcgcccctaaccggcgcacgggttcgccgggcacgcgcggacgcgcctgcaacagcagtgccccggacctcagcggctgcgacctgttgtgctgcggtcgcgggcaccgccaggagagcgtacagctcgaggagaactgtctgtgccgcttccactggtgctgcgtggtgcaatgccaccgctgccgggtgcgcaaggaactcagcctgtgcctctgacccgtcgcctgcctcggaactgctggcagccacctctgggccatctacaggactattagattccagcagggggcgctgtctgagtccagcagctccctaggaaaagtacctatccaggccttgggaaattacaggggccagccaggaacttggggtttacaccagcccacgaaagcccgggggaacattcccctgaaaggccctttgctagttcctgcaggagatcactccccttggccccccagatggaaataaaaaagccagactctgccctctggaaataatattcctcagaattactgggatggatgggtgagtttagtatcaataaagacatttaaatccacagtttgagaggaggtagtcctagagggccaggatatggaagaaagttggtcctggtagagttagcatttcagtctgagtctatcattccacctgttaccaaggcatgacggagtgagggaggacttatggaaaggcagaaaagagggtgagggagggctcctggaaacctttagcacaccttctgttctttcttggctctcgagaacttgtggtcccatgttaaaggaacacaaagaggccagaagcttctagtagtgggcttagttgtcaggcgtctgtgtgaacttttatggcattctgtctttctgtgactcctgatgaaattaacggtcatgagattaaaagctcgtcatgaactgtaaaatg

SEQ ID NO: 1757 - DNA, 2064 bp, Mus musculus
tgatttcttctctccagcgagctccgcagaagacacaggcgctggttgctgggtccgctctccgcctccgccgcgccctcctcgcccgggatgggcccccccgccgccaccgccgccggagccctagtctccgggccgccgcctcggtcgccgcgtttgccctgaagcccggtgcccgcgcgccccggctcaccccgcagcttcactccccacccccagccgcctccccggccagactgcggtagagctctcaggatgctgccgccggtgccctcccgcctcggactgctgctgctgctcttgtgccccgcgcacgtcgatggactgtggtgggccgtgggcagccccttggtcatggatcctaccagcatctgcaggaaggccaggcggctggcaggaagacaggccgagctgtgccaggcggagccggaagtagtggcagagcttgcccgaggcgcaagactgggggttcgagaatgtcagttccagttccgtttccgacgctggaactgctccagccacagcaaggcctttgggcgcgtcctgcagcaggacatccgagagacagctttcgtgtttgcaatcaccgcagctggtgccagccacgcggtcactcaagcctgttccatgggagagctcctacagtgtggttgtcaggcaccccgcgggcgggcaccgcctaggccctccggccttctgggcactcctggacctccaggaccaactggctctccagatgctagcgcagcctgggagtggggaggctgcggagacgatgtggacttcggggatgagaagtcaagactctttatggatgcgcagcacaagcggggccgtggagatatccgtgcattggtgcaactgcacaacaacgaggcgggcaggctggcggtgcggagtcacacgcgcaccgagtgtaagtgccatgggctttcgggttcctgcgctctgcgcacctgctggcagaagctgcctccgttccgcgaggtgggcgcacggctgctggagcgcttccacggcgcctcgcgcgtcatgggcaccaacgacggcaaagctctgctgcctgcggtccgcacactcaagcctcccggacgagcggatctcctctacgcagccgattcacccgacttctgcgcccctaaccggcgcacgggttcgccgggcacgcgcggacgcgcctgcaacagcagtgccccggacctcagcggctgcgacctgttgtgctgcggtcgcgggcaccgccaggagagcgtacagctcgaggagaactgtctgtgccgcttccactggtgctgcgtggtgcaatgccaccgctgccgggtgcgcaaggaactcagcctgtgcctctgacccgtcgcctgcctcggaactgctggcagccacctctgggccatctacaggactattagattccagcagggggcgctgtctgagtccagcagctccctaggaaaagtacctatccaggccttgggaaattacaggggccagccaggaacttggggtttacaccagcccacgaaagcccgggggaacattcccctgaaaggccctttgctagttcctgcaggagatcactccccttggccccccagatggaaataaaaaagccagactctgccctctggaaataatattcctcagaattactgggatggatgggtgagtttagtatcaataaagacatttaaatccacagtttgagaggaggtagtcctagagggccaggatatggaagaaagttggtcctggtagagttagcatttcagtctgagtctatcattccacctgttaccaaggcatgacggagtgagggaggacttatggaaaggcagaaaagagggtgagggagggctcctggaaacctttagcacaccttctgttctttcttggctctcgagaacttgtggtcccatgttaaaggaacacaaagaggccagaagcttctagtagtgggcttagttgtcaggcgtctgtgtgaacttttatggcattctgtctttctgtgactcctgatgaaattaacggtcatgagattaaaagctcgtcatgaactgtaaaatg

SEQ ID NO: 1758 - protein, 362 aa, Mus musculus
MLPPVPSRLGLLLLLLCPAHVDGLWWAVGSPLVMDPTSICRKARRLAGRQAELCQAEPEVVAELRARLGVRECQFQFRFRRWNCSSHSKAFGRVLQQDIRETAFVFAITAAGASHAVTQACSMGELLQCGCQAPRGRAPPRPSGLLGTPGPPGPTGSPDASAAWEWGGCGDDVDFGDEKSRLFMDAQHKRGRGDIRALVQLHNNEAGRLAVRSHTRTECKCHGLSGSCALRTCWQKLPPFREVGARLLERFHGASRVMGTNDGKALLPAVRTLKPPGRADLLYAADSPDFCAPNRRTGSPGTRGRACNSSAPDLSGCDLLCCGRGHRQESVQLEENCLCRFHWCCVVQCHRCRVRKELSLCL

SEQ ID NO: 1759 - DNA, 14418 bp, Homo sapiens
gctccgcaggagacacaggcgctggctgccccgtccgctctccgcctccgccgcgccctcctcgcccgggatgggcccccccgccgccgccggatccctcgcctcccggccgccgccgttgcgctcgccgcgctcgcactgaagcccgggccctcgcgcgccgcggttcgccccgcagcctcgccccctgcccacccgggcggccgtagggcggtcacgatgctgccgcccttaccctcccgcctcgggctgctgctgctgctgctcctgtgcccggcgcacgtcggcggactgtggtggtgagtccggctgtcctggcgcggctctggaccctggagggtggggaccccgggacccaggacagactggggtgttccgcagcctcccggctctacctgctctccgagcccagctttctggcctcggccgggggcgtttctgaactccacttcgacgttcctaaccctcgggaacattctattgtgtttcctcctcccgggttctctcccaccccccgccaagttatgcgctcacccagctcaccaaggaacaggcgagtgggtaggaaagatctttcgggaagacacatatccgaggaaaagaatgtgtgaggagggccctggattcagggtatggggctggatttggagaagacaggaacaaggtgggaagccacaaggcagagagggccacacagctgccccttccccgccctgctttgcctaccaacccaccggcttctctctgggctcctgaggagtgggccttagtgacgacagagggaatataaaggggaaagtgagtcaggaccctggttttctctacctcgtcctccccaagcaaggaaaaggaggagcggaaggaaccggacccaggcgcccggcccttccagacctgggggtcatgaatgaaaaaatatgtgcagcccgggagatacgggaccgggaggggtcctgcgggaagggagaggggcctggccagccaagggaagggggcgtcttcccaggcttggccctagctagaagggacacctaggcagcgaaggttgcgggagcttcgagccttgggggtgggggtggggccggggcggggaaggagggtgcccgaccgggacggctcagagatccagatccaaaggacttttttccccctaggtctccagagccgcaaaccctcgcccggaatagctcagtgtttagagaggagagacttggacaataacgctgacgggttagccaatcctaagaaggcagggtcgtgtctatttgcatattgccatgtgattggctggatgccgaccctccgctcctccctcgccccccagatttggaagagaggcagatccccgtgctctggagagatagggagtaggatgcccacacagggagtggcgggcagcaatccctactccgtgatgcggagagccgtccgacgctagtgtcacggaaagggcgaaccgaggacgacccaggtcctatctagggaacatatgccctttgatccggcttagtataatgcagtggcagctttgaagcagatagatctaagatctaaacattatgtttgtgatcttgggctagtcacttcctttccctacctctcagtcttaactggaaataggataacagtctccctacctggcaggcttgctgggaaggttaggtgggaggacgtgtagaataataggaccttaggaggtactcagtatgtacagcgcccccctcacaacccagcttctcctggccagggtccccaggagtgaaaaaggggattcatttacatttaaaatccagagttccaaggaaaatgttgtaaaggaatctcttttccccataaacgcctaactttgccctttttcaaggtgtggggatggggtccctccctgatggccattgtcttccttcccctccctccccctctgtctaaatcattcttatccttacggttaaaataccatttcctccctgaagctgcccccttgtcctccttccattgccttctctgcgctcccactgtatcacatacattgggcaactatgctggttactgcatttggctgacaacagtcctttaggtctctcttccctgctcctggaaggcagataccttgtctttaggagccctgaggcctaggagtgtgttggtgctggagatgggcttgcagagtgtcattggactggctgattcacctttctgggctctgtatctgtggggcttcctttgttcaggaaggactgctgggtggcagccaagccaaaggagagtggcctggtccctgagagactgaccctgaagctgggaagaagggagtgggggaggaggtgacacgggcaggtgtgggagaacacagaggccttcatggccacagctgcagggcgtgccgggtgaggagtgaggggtcccagtgataacgtgtctgactgccttgctcagatgtgcctctgagggaatgagcctctcctccctgccttggccccttcactctcctttgtctattcattttgtttttctttctttatttctatttttatttatttatttatttagagcagagtctcgttctgtcgcccaggctggagtgcagtggtgcgatcttggctcatggcaacctctgtctccccggttcaagtgattctcctgcttcagcttcccaagtagctgggactacaggcacccaccaccatgcctggctagtttttgaatttttagtagaggtttcaccatgtttagtagaggtttcaccaggtttcaacaaggtttcaccgtgttggtcaggctggtctcaaactcctgacctcaagtgatctgcccgcctcggcctcccaaagtgctgggattacaggcccagccattaccatggcattaccatgcccagcctattttactttttattttttatttttttgagacggagtctcgttgtgtcgcccaggctggagtgcagtggtgcaatattggctcactacaacctccacctcccggctcaaatgattctcctgcctcagcctcctgagtaactgggattagagttgcccaccaccatgcccagctaaattttgtatgtttagtagagacgaggtttcaccatgttggtcaggctggtctcaaactcctgacctcaagcaatctgctcaccttggcctcccaaagtgctgggcttacaggcatgagccattgtgcctggtcacttgtctatttctgacacttcatctctttggtctgagcccagatccccttcccctggatctttgactctgcttacactcctgagctctccccaccctaccagtgccctccaagatcaagtttgggttgatgagctggaccaataattcccactggcctgaggctcttccagtcccctaaatccccagtctcacttcagctggcagctttcccagtaagggcttccaggctgttccccgatgcccaggacctgctttccctggccttcttctccctacttgtcagagaatcctggccaggtcagagctccagtgctggccaggaaagcagctgcagcagcctcctgcatcccactctgacattctagcagcagccaggctagaagcagagaggaccccaggacctttgagtgactcgactgtcttggtcaggaaagaggctcatgcccttggaattggctcggagacctggctccaggttcctgagaagtttctctcccaccttctttttcacttcccttccttactccaatgtgatgcatgctttctaaactctgtctccagctcaggcacagaggctcactcctgaaatcccaccactttggaaggctgaggtgggcggatcacttgaggtcaggagttcgagaccagtttggccaacatggtgaaaccctgtctctactaaaaatacaaaaattagccaggagtggtggcaggtgcctgtaatcccagctacttgggaggctgaggcagaagaatcactcgaacctgggaggctgaggttgcagtgaaccgagatccatgccactgcactccagcctgggtgacagagcaagactctgtctcaatcaatcaatcaataaaaataaactcttcccctagcctctctgtctttctctcatttgtaatcatatctttgtgaattacagaatcccagattcaaggacattggccaggctctctggaaatcatcttgtccagcctcattgcatccaggtcatccagcctatcctgtggccctgacagaccctgtcttgggagtgaggcagagagggagagcttcccagtcaccagttccccacttccgctctgctccttgctccggccttgcccacccccaggaagttctttacaacatctgacccatcattatttatacctccaatcggtggatgtagtaaagagctcactctcatagaatggtcaaatcaatctccttcttctctcttcctctttcctctgtttttttcttttcttttctttttttcctttttgagacagagtctcgctctgtcacccaggctggagtgcagtggtgcaatctcagctcactgcaacctctgccacccgggttcaagtgattctcctacctcagcctcctgattagccgggattacaggtgcctggcaccatgccagctaattttttttttttagtatttttagtagagatggggtttcaccatgttggccaggctgatctcgaactcctgacttaaagtcatctgcgtgcctcagcttcccaaagtgctgggataacaggcgtgagccaccgcgcccagccctgttttatattttctatgaaagaaactaaccctccccttgttccactagggaaaacaccacccagtgtcactcccttcccccatcccatcttgtctttcacccacccccctcctggaaaaggaaacaagagccagaggcctaggacagcctcatctggccccacagggaggcagggaaacgaccctggcttctttgtggcactcaggttttctagctgccacccccaacccaggctgggcctgaccaccctttcccatcctgtctttatctggggcccctgacccatcgtgggcagtcctgttgctggcccctgctgagctccagggtggggtgtgaaagggggtgggttggccatccattcccccctccaggcctcccgccttggcagcttcccctggagggatacaatggggctgtgagcagaaaagggcaggggcagaaggaggctggcccaatccaggccagagcatgccctgagcccaccagagttctggcactgagacatttcctggggggtgcagccccctcctgccctgttctcatcagaagccaggagttggtggggagaggtcagcaggaggtttgctcatcaggcccagcaagcgggggttccagaatgtgcactatgatggagaaatgccactgtggaggggatgaggcgagggcagtgtggtcaggctggcaggagggtggccgcaggacgcctgtcctttgtgggtcagtgaaagcacccccagcctgcaccctccttcctgcctaggccaggcactccctcgggtgcttctccagaactgccggaggaggagctgagggagagaaagggctctgggaggcttctccaccttggcctctttggctggttcctccagttcctgagccctctgtttaatctagaaagtagatctagaaagcacttacagataatcaggtccaatattttcacttacatgtgagggcagcaaggtcacagacaggcggtgagaagatgacttgcccctggccacccggaatgcaggcagctcagagccagactgagagtccacctctggctcagtgcctcattcttgtgaggaggtgggggatcaggaaaggggcacaggatctcccacaggcctctcctgctcccctgtcccaccctcagataggtgctccccaccccaatatgggcgagcagagggcccaggacagtctcctgggggcacctttgcctgccgcagccctgaccaataggaagcccttttgtacagcgaagtctgtcagggaagggaatgcctccacctctcccaagagtgatgaggagagatggtgaggaagggcagagggaaccaagttgggttaggggtggtgaggtggggaatggggtggctgggggggcagtggggaggcaggggttaatggagctgggcatcactggctttgatgtggtggtttgggtgggggtaggggctgggggaggggagcagtaattaccgagttagacagagcaggacaggacaggcgggcgggcacaggcccggcccagccgcctcagcagcagtcaggcaacatttttctgccccttctccaccacccacctcccccacccctgtgcaacccccacccacagccccagggctcagggctccctctgctggcttgtgggaggtggggtcagtgtggggaccttgggagtaggggtggggaaatagagggaggctggcttggagacccttcagagggcgttgggtagccagtgggctgtgatccctttggcctcagtgatccacccaggagtgcctgctggggaagaggagggtcctagagggtgcatttggtccaggagcagggctggatggaggaggaggagacacagggatccaggctgagaagaaatagcagagagttggagaaaagggtgttctcaggaatccacaatgctgcctgcaccctactgtttgtcctgaactgggcaggctcaagagatgaataagggtgtggtgggaagacaaacaccagttgttggaggaagcccactctctggacaggttctctgcatctgtaatctgggagggaggtgggtattactagtttcatttgacagttgaagaaactgaggctcaggaggttaagtctcatcatccatctaatgaagactaagtgccagcttcacatgctagggactcactcaacatcatagaacaagcaaatggcagagcccagatccaaactcaagtctggtggatcccaaaaaccctgagcgtactccatgaatgtccatgcatgagcttattgtcttcgatgagttttctacctagttagaaagataagacaagcaaacatgaaaaattaattataccactggcaggataacagacgcccccaaatgagaggcgccccgggtgatgcatggaggaaggtctgtggggactggggcccagggaggctccttagggcaagtgggatctgaggtgagtttggagagatgctaagattttgatgacttagggtgggtctgaatccagaattttagcgatgttatctggaatagattcagagttaatcaaccttgctaggggtacggggctgtgtggaggatggtgtgggaggccactggaagtcttctgatatctcacgtgcccatttccctccagcactgtttatgtttgaaatattcatctactgtgtcttgcaatagggatccctccaccagtggccagagtcagtcgcctcctgtcttgctcatctgcataacgagggtgaagtgggtggggctgaactgggtgatctctgacattgttcttggccctctgactcaagagatggaaaggtaggttaggccagaaacctaggacatccagggcttaggtctacacatattgccaatagggactggctggcccctgataccacctccctaggcaattgatcctaccaaccatggtccttggtagagagaccttggcgcaggccaagccggttagaatgaccatccattgccttgtcccttcttgtccgcatactgatttcttttagggctagcctcatttttttctatgcccaggaatggctgtttgatgaggatcccagatcctatatattgtgtattccctactaccactgtgcttcaggccccaaaacatgcaaattctcccaaaggagcacatcttctctgggctgatcctaggccaatgctgacccaaaggcctgaaaagcagagttcactccctaaggaagcataaagcgaggaaggtgaaaggtgagtggggatgggggagttattacttgatgtgttgtcaaaagccaaagttatagggggtacgtgagtctctcatgctaactcctcagtttttctgaagcccacaaaggggaatgacttgatcagagtggctcagcccacacagagttgacagaaaccagagatcggaagcgaagcttggtgttttgcccaatgccccctgccacgccccttctggagtttcatttcctatgtatttaggatgggagcaaggacaggagggcagggaacaaactggtcccttgggattctagctgctactactgcccatccctccccctgaccagcttgtaaacaagtctagttcccaggcagccagccagcctggggagccagacccagaccaggaactggctctggggcagtcccccagccccagccctacctcctgaaagtccctggcctccatactcctcgtgattctcccgtctctagtccctgcgaaacagagaaggtcaagaggtttttgtctttctgtcttgctcatctccactccctcctgccttcttaagggaggaggagggagaggagaaggatggggcagagtaaccttgggaagataaggccaggcaaccctgggaaactagggagttagcagagggcagggttgaggaggagggactggggaacttagaagtaagggaagtgggggtggggaagatgagcttgcagagcccccgactcacaggtggagccccagacataaggggctggacgactgcagagaggactcattccctgcctgattcccagtgggggaaaagagcatgtttgaggaaatgaattaggagtcatgaaataagatgtggacaggggcctgggctcaagtgagaactttctcttagatggcttatttactcattcaaaaccacatattagatggtgttcattgtataatatactacaggtattacatgtgacacagaattcatactatgcaattttttgtaatgaaaattggggttgggggaggatataaactaagtacctaagtcttccaggagatgcaaaggaaaataaggcagtcttaatgctcaagaagctcatagtcttatctcctgaccctgcacagccatgttggaagctgcctccaatccttcttataatgaggtgggatatatgggcagaggagggacagatagattgatggatcaatagagaccgatcagctctcaaaagtcactgggtcattggggtgccctgacccaccctccattgctttacttatctaggctgggaaagggtgggggccagtgctgggctggtcttaagcacgcaggaaggaagatgtggactgtggcctctccattgagagacatctgattcctgagctacttgggtacggatgacggcagcaacttgattttgtgtgtgtgcgtgcgcatgcgtgcacgcatgagaatgcacgtgcacacacacgtgtttgtgttgtagaccataaaggactgagcttactacacatcttcctgtaccacctcttcaagcatctccatccttagtgttgagagttctaccttaagacctaaattcctcttgcttctatttaagaccatcacatttcattgttgtggagccagaacattcctgggcagcctgtacttgtggagcaaatggggacagtggggcggatatgcactaaagcaaaactgaaaagtaggccaccttgacctctggcaccacctaccaccattctctatgttttctctctcctgggacccctacccccaccctgtcctctgctgaagagcttttgggtggtctctaattaccctctgctcccagatgctctactcattcatttgagatgggaatcccagctaagtgttcaaataggagcattctgatgagagcagttcccccaggtatgaatccctaaggaattaaccttcaggggtctggtataccaaaaccaaatgtcagctctctccttgggcagaacgaaggccaggagttgagggatttctggaagtgcgtgagacttcccgtgaagtcttcccctaccaagccaaatattgcctgcacccagcagtgatgtcaccctaatgcgcagggcttggttcactgccattctgctcagagaaggcaacagatccttggccatgtgtggtggctcatgcctgtaatcccagcactttgggaagccgaggcaggcagatcacctgaagtcaggagtttgagaccagcttggccaacatggtgaaacttgtctctactaaaagtacaaaaaaattagccaggcctggtggtgcacacctgtagtcctagctatttgggaggctgaggcatgagaatcgcttgaacctgggcagtggaggttgcagtgagctgggagcccgccactgcactccagcctgggtgacagagcaagactccatctcaattaaaaaaaaaaaaaaaaagaacgaaaaccacagatcctggagcaagagaagggtcagtgtcacctactttccaacaatgcttcagagacctggcccccagctccttcttcctgctctccagttcagggacatagaagatatcagggtaggagggcccaccttagagatgaaagcccaacacacccattttatagaaggagaaacctgggctatggagagggtgtgacttttctcagctaggctccattccctagccgttccaacatctcgtggcattctctctccctgggattgttcttgcctttcatccgggctgttcagctgacacatatccagcttgtggtccactaggaccatatcattccttgatactgcttacttttctttggtgtctcttgacgacacatgaatttccttgacggccttcttgatctttcttctgttatttcttttccttgtcacccttttgggctagaagtttgagttttaactttgacttacctgatgccagctgccttcaccttgagtaaaatttctataagaatttatttacaaagatgtgtgcaggaagataagattgaatctttgctctgtagcaattatcagactagactctagttagaggggacacagacatggactagcaggagagccagacaggacaatctcaagctcagtttggaggtagggtgggagggcatgtcacagctcccgctgcgggctgagtggggctggtcctcctcccttccaccccaagcccttttttgggttacacccctgacctgctattctctgctttccagggctgtgggcagccccttggttatggaccctaccagcatctgcaggaaggcacggcggctggccgggcggcaggccgagttgtgccaggctgagccggaagtggtggcagagctagctcggggcgcccggctcggggtgcgagagtgccagttccagttccgcttccgccgctggaattgctccagccacagcaaggcctttggacgcatcctgcaacagggtcagtgtggggagggggcggaagtggggctgctttctccctgctgtgggacccgaggagaggagaactggttcgctgaagttgcctgagccccacttccccctcacatgtgtctgggcaccctgcaaggaccctgcctcccaggcccctggggcagccctcccgccgcaggtttcaggtcccaggccccagctgaccgccccagcccgcgctgattgcacctgtctgcattcacagacattcgggagacggccttcgtgttcgccatcactgcggccggcgccagccacgccgtcacgcaggcctgttctatgggcgagctgctgcagtgcggctgccaggcgccccgcgggcgggcccctccccggccctccggcctgcccggcacccccggaccccctggccccgcgggctccccggaaggcagcgccgcctgggagtggggaggctgcggcgacgacgtggacttcggggacgagaagtcgaggctctttatggacgcgcggcacaagcggggacgcggagacatccgcgcgttggtgcaactgcacaacaacgaggcgggcaggctggtgcgtacgggcaggatggagtgagtgtgtgcggaaatgtgagtgtgcgcgcaggagtgtgcttgaggaagtgttggcaggagtgagggtgtgtaggtggaggggggcgttaatgtgtgggggagtgcgcacgggcggaaagatgggctgcaagcatggatggacatgtgggaggagaggtgtccagcctccaagaaggagtcacgtgggggtctgagaaggccagatgctggacggtacagcgggcagaatgggggaagggacactcagggaataggactgagggtctttagtgaccccaggcagagagggcacagcttcaagacaggacaggtgaagcaaagcttgcagtgggtaggaggtctggatgcctaggcaggggcaggagaataaaacaaaggtggggatgaaagacaggatagaagctaatgcaaggtctggggttttggtacagggaagccagggggagtgagagaggcctagaaagagttagaacaggtctgaggggcaatggaaaagagcgaaggacaaggaaccaatcctagtggaggttggagggagtcaggtggaggccaggacagctgtgaccaattctgggcatttgccaactggctgcccagcaacaccagcccaggtctcacctgcccagagccatggcagcctctcctctcccctctgtaacgaggagagccccaggagctctcattcaggggcaagaaggttgtctgggtgtgatggttccaggagggggcagggcagactcaggaggtgggagtgggacacatggtcaggttagcccctggactctgagcttccagaaatgattttcttgggtcttctgaaccatcagcgcttggtgggtttgggaatcttagaccctgcttcagacagtgactaggggagaggccgcctgggttccactctcagtactgcattcccagcgggccctcctgcaccccatgcctccgttctagcgttctccagggacatcgccatacataccgtgtcctctagggttcgggcctgaggcatcgggcagggggaggagggggcctgaagaggaatgtccggacaggcccacatacctgccgagagggttggggaggggtgacggagacagatgcccaggaggctggctctgcgtctgtgctcagcccggcctgggggccgtgaggggtaggaatgagggggccaggtaggcaggagagctagacttcgacagctgccacctctcccctcctccaaagagaatctcacccctgctgtccattctgctttctcccccaccccctgcctttggaccctggaatctctgcgctgcatattgtccccgtctcccctcttcgtcatcatcatattcctccatcctcaccattcctcctgctcctcccctccgagttgtcctttccttgatttcctccccctgaacttgcggtctccttttgtctgcattttcctctcttcctttcacctcccattcccaatcttattttctgtccatccgctgggcccttccctgcaccccctacctgtccacatgcgtccgcccctctgcctcccgcaggccgtgcggagccacacgcgcaccgagtgcaaatgccacgggctgtcgggatcatgcgcgctgcgcacctgctggcagaagctgcctccatttcgcgaggtgggcgcgcggctgctggagcgcttccacggcgcctcacgcgtcatgggcaccaacgacggcaaggccctgctgcccgccgtccgcacgctcaagccgccgggccgagcggacctcctctacgccgccgattcgcccgacttctgcgcccccaaccgacgcaccggctcccccggcacgcgcggtcgcgcctgcaatagcagcgccccggacctcagcggctgcgacctgctgtgctgcggccgcgggcaccgccaggagagcgtgcagctcgaagagaactgcctgtgccgcttccactggtgctgcgtagtacagtgccaccgctgccgtgtgcgcaaggagctcagcctctgcctgtgacccgccgcccggccgctagactgacttcgcgcagcggtggctcgcacctgtgggacctcagggcaccggcaccgggcgcctctcgccgctcgagcccagcctctccctgccaaagcccaactcccagggctctggaaatggtgaggcgaggggcttgagaggaacgcccacccacgaaggcccagggcgccagacggccccgaaaaggcgctcggggagcgtttaaaggacactgtacaggccctccctccccttggcctctaggaggaaacagttttttagactggaaaaaagccagtctaaaggcctctggatactgggctccccagaactgctggccacaggatggtgggtgaggttagtatcaataaagatatttaaaccaccaggg

SEQ ID NO: 1760 - DNA, 1708 bp, Homo sapiens
gctccgcaggagacacaggcgctggctgccccgtccgctctccgcctccgccgcgccctcctcgcccgggatgggcccccccgccgccgccggatccctcgcctcccggccgccgccgttgcgctcgccgcgctcgcactgaagcccgggccctcgcgcgccgcggttcgccccgcagcctcgccccctgcccacccgggcggccgtagggcggtcacgatgctgccgcccttaccctcccgcctcgggctgctgctgctgctgctcctgtgcccggcgcacgtcggcggactgtggtgggctgtgggcagccccttggttatggaccctaccagcatctgcaggaaggcacggcggctggccgggcggcaggccgagttgtgccaggctgagccggaagtggtggcagagctagctcggggcgcccggctcggggtgcgagagtgccagttccagttccgcttccgccgctggaattgctccagccacagcaaggcctttggacgcatcctgcaacaggacattcgggagacggccttcgtgttcgccatcactgcggccggcgccagccacgccgtcacgcaggcctgttctatgggcgagctgctgcagtgcggctgccaggcgccccgcgggcgggcccctccccggccctccggcctgcccggcacccccggaccccctggccccgcgggctccccggaaggcagcgccgcctgggagtggggaggctgcggcgacgacgtggacttcggggacgagaagtcgaggctctttatggacgcgcggcacaagcggggacgcggagacatccgcgcgttggtgcaactgcacaacaacgaggcgggcaggctggccgtgcggagccacacgcgcaccgagtgcaaatgccacgggctgtcgggatcatgcgcgctgcgcacctgctggcagaagctgcctccatttcgcgaggtgggcgcgcggctgctggagcgcttccacggcgcctcacgcgtcatgggcaccaacgacggcaaggccctgctgcccgccgtccgcacgctcaagccgccgggccgagcggacctcctctacgccgccgattcgcccgacttctgcgcccccaaccgacgcaccggctcccccggcacgcgcggtcgcgcctgcaatagcagcgccccggacctcagcggctgcgacctgctgtgctgcggccgcgggcaccgccaggagagcgtgcagctcgaagagaactgcctgtgccgcttccactggtgctgcgtagtacagtgccaccgctgccgtgtgcgcaaggagctcagcctctgcctgtgacccgccgcccggccgctagactgacttcgcgcagcggtggctcgcacctgtgggacctcagggcaccggcaccgggcgcctctcgccgctcgagcccagcctctccctgccaaagcccaactcccagggctctggaaatggtgaggcgaggggcttgagaggaacgcccacccacgaaggcccagggcgccagacggccccgaaaaggcgctcggggagcgtttaaaggacactgtacaggccctccctccccttggcctctaggaggaaacagttttttagactggaaaaaagccagtctaaaggcctctggatactgggctccccagaactgctggccacaggatggtgggtgaggttagtatcaataaagatatttaaaccaccaggg

SEQ ID NO: 1761 - protein, 363 aa, Homo sapiens
MLPPLPSRLGLLLLLLLCPAHVGGLWWAVGSPLVMDPTSICRKARRLAGRQAELCQAEPEVVAELRARLGVRECQFQFRFRRWNCSSHSKAFGRILQQDIRETAFVFAITAAGASHAVTQACSMGELLQCGCQAPRGRAPPRPSGLPGTPGPPGPAGSPEGSAAWEWGGCGDDVDFGDEKSRLFMDARHKRGRGDIRALVQLHNNEAGRLAVRSHTRTECKCHGLSGSCALRTCWQKLPPFREVGARLLERFHGASRVMGTNDGKALLPAVRTLKPPGRADLLYAADSPDFCAPNRRTGSPGTRGRACNSSAPDLSGCDLLCCGRGHRQESVQLEENCLCRFHWCCVVQCHRCRVRKELSLCL

SEQ ID NO: 1762 - DNA, 4272 bp, Mus musculus
agagcgcacccagccggcgccgcacagcagtaggacctgtgctcgcttggcaatcctgctccgcatccgcctatccgactgctcaccggcagtcccggctgcagaccgtctgcacacctcggtcccatcggcaccatgcacctctcccagctgatcgcctgcgccctgctgctcgcgctactctcgctccggccctctgaagccaagcccgggacaccaccgaaggtgggtgctgtcgcggggacgctgggcttgtgaggggcgtggaaagatgtggtgcgcaggagggagcagagaacccggaaaggcagaccccctcggacttgctccctcaaagcggggacttctcgggttcatttcccagcctcgggagaatgtcgacacatgcacacctcccgtgccccaatgtgcccagcatgacctgcggcacgggaagagcaatgggctccccggaggagcaggcaagaaggctgcgtggcaggtggatgctggactcagctgtcccgcatcggtggaggcacgctcatggctgagaagggccacgccactctgggccccgtaaaagtcatctatgctacatcggtgcactctttcacctgtccactcttttctccgacaggtcccgagaaccccgccaggggaggagctggcggattcccaggcagctggtggcaatcagaaaaagggtgacaagactccaggcagcgggggagccaatctcaagggagaccgatcgcgactgctccgggacctgcgtgtggacaccaagtcccgggctgcttgggcccgccttctgcacgagcaccccaacgcgcgcaaatacaaaggcggcaacaagaagggcttgtccaaaggctgctttggcctcaagctggaccggatcggctccatgagcggtctgggatgttagtgcagctacccctggcggcggtaagtaacaccatcggacgctccccgctcgcctagctctgcacccaagagagccaagctcttatcactgtccttcgcagactgtttggtttcctccctgatccctatgttctgtgaccttcccccaaccaatttaggcatgggatcaagtgtacccagacatttgcctgccacctcacatatcccattttacagatttaaaaaacaacaacaacaaaaaagtgaacacgggccaggtcagagaccaggttcagccttagagtactccatctggcttcctctagaaaaatagagacaggcttatgcagtcccagcctccaaacccaccactgaccactggccagctagccaactggaaacttgttagagagatcctggaaagagggagagaaagatgtaccaccagccctgtgccagcagccaagcagtcaagtgctaggatgcctttctggggctgttgtccctcaggtgaggcaggcatgcagatatgcctgccccctcctagtagagagaacctctgtggcagcagcagggcactcttctgcctggggcattctgaatcttagccctgctctcaactcaactgtgggcaaactggtctatccagggtcctgatgctgctgccctggggcttccgagatgaaccttaggctggtgaccctgtttcaagagagaggcaaaggaacaagctaaagcttatttcgtgacctaacctcaaactcagtgtgtccacagtgagttctttaccagccttgtggtgctctgaactatttctggcctccttcccctccatggagacgggaagcctccatcttcccagcatcctcataagctgctgggtccttcctgacttccttctgctctctatccctgatgatgtgatgagacacactttacttagataagtgcttgacagtcaggcttctgctgttccttggctttgcctcttgctctagcccaccccagtggtgaggaggctgctctccccaacccaggaagattgaccagtggccattcttttcccagtaaggagtaggaacacctcccccatcacatgacaggagcctttttttttttaaaggcatgagagacctttgcagaagtgcagtgctctgtgtacttgtgtccccatattaattcatgagtaacttaagtgacagaccttcaggagcccacatcatacccagaagggatcttggaaatattggccactgacgagagaaacacatacccccagttcaggagctctgccaagtgccctggctctagatctcggatggccctctcctctctgcactgagtcttgaacaggctgcgtgcttcaccccagttccacagaggtgttaggtctctgctctactcagggagagcggtgattctagtacttatgggcgggtcttttgctatgttccatatgaatacctaagagatggagtctgaggacttgaattttcagtttgcgatgtatgtgccaagaaaggactttagagtctaaaccaacgttacttaacctccggttaaatgcctggaatgtgcttctctgaaggtgctttaggcatctgtgggcacagggtagtgagaatgttgaggaaaaatcaagacaattaaggcttctacaccctacccctccactttgaccagtggagatcatcagcctcctggaagttctcttggcataaaggcaaagcctcagcctcctctatgccagccccagtgagaggatagatcgtccttccaacctgaagtctcccagtggagctggccagcggagagcacccatttggtcttatggaagagtgcaaggctcatccttcatgctgatgaaaactcccgaggctctgcccctttctccacgcagaggttgactttggctctaggcatcgtcataatgactgccgctgatggttataggttttgattatacaactggcagagactcgggtgtggccaagacctcaatggacattttgcctctggccctaggaacaccacctgtgaaacagccagagaatcgagttagggagaattgcccagaccatcagagccaggcccctcgtgagtgcagtcctttaggagggccctgcatgtctgccagttttttgaacatggagaactcatgcagccaccactagtagggactgagtacagcggtcatcagcttactctcatccttcaaaccctccaacgcagcaaagctgtacatttgccccaggctggtggcagacactgccagctgctgcagaaggggacattgaagccaccaatttctaagacaaaggtagctaggagaggaagtgttctttgctgcttagaagttgtgacccagacagggcagatgcttaatatgtggccttttgttaaatcccagtgctggctctgggaggtggctattatccattttataggtgagctcaaagctacttggggccatccaggaagtcaaatcagatcgacgatttgagtccagaataggacacacttccccctgagttattctcttctctgtccctatgtagccaagcagacatgaaaccagatgaaactgactgccctggggggttgtgttgtagcaaaaatgagctggaaaggggccgctattctcagccattgccgagagcaaggcctgtagttaaatcttaggggaggggctcaggtctggcagatgctatggtttcacctgtgctggtccagccagtgccgatcaaggacctgtagatcgaaggcacacaggctttgcctagtgctactgtaagaaaggggggaaagttctacaactaccctgtgggatgggctttttcagtgaagagaccggaactgagtgtcctgtgttcactttgtgtttcaggattgggaactgctctgtgcactgaggccatccctggtcatcagcctccagcatctggaaacacctccaacgcaatgtggcttttacatttctttttttttttttcctcctggtactggcaatacacaacaccagctgttttattattatttggggaggggagggtatgattttattgtttggggttttttttgaaaatgaaaaataaaaagttatatattatatatatattatatacatgagacacacactcccacaccgacttgatgacaagggacagtttttaaagtgactgacaaaaccagctagctgtaaaacattgctgtttgtaaattcacgtcatgcataaatgtatttatgttgtaaagctatttatattgtttataaagagatatttataaaaattttatttatgtaactaaatgaaagaagccaaccattgtaatgtttttgtcctaactagttgaaaaaaatgttaaaaaaaaaaagccattcca

SEQ ID NO: 1763 - DNA, 1033 bp, Mus musculus
agagcgcacccagccggcgccgcacagcagtaggacctgtgctcgcttggcaatcctgctccgcatccgcctatccgactgctcaccggcagtcccggctgcagaccgtctgcacacctcggtcccatcggcaccatgcacctctcccagctgatcgcctgcgccctgctgctcgcgctactctcgctccggccctctgaagccaagcccgggacaccaccgaaggtcccgagaaccccgccaggggaggagctggcggattcccaggcagctggtggcaatcagaaaaagggtgacaagactccaggcagcgggggagccaatctcaagggagaccgatcgcgactgctccgggacctgcgtgtggacaccaagtcccgggctgcttgggcccgccttctgcacgagcaccccaacgcgcgcaaatacaaaggcggcaacaagaagggcttgtccaaaggctgctttggcctcaagctggaccggatcggctccatgagcggtctgggatgttagtgcagctacccctggcggcggattgggaactgctctgtgcactgaggccatccctggtcatcagcctccagcatctggaaacacctccaacgcaatgtggcttttacatttctttttttttttttcctcctggtactggcaatacacaacaccagctgttttattattatttggggaggggagggtatgattttattgtttggggttttttttgaaaatgaaaaataaaaagttatatattatatatatattatatacatgagacacacactcccacaccgacttgatgacaagggacagtttttaaagtgactgacaaaaccagctagctgtaaaacattgctgtttgtaaattcacgtcatgcataaatgtatttatgttgtaaagctatttatattgtttataaagagatatttataaaaattttatttatgtaactaaatgaaagaagccaaccattgtaatgtttttgtcctaactagttgaaaaaaatgttaaaaaaaaaaagccattcca

SEQ ID NO: 1764 - protein, 126 aa, Mus musculus
MHLSQLIACALLLALLSLRPSEAKPGTPPKVPRTPPGEELADSQAAGGNQKKGDKTPGSGGANLKGDRSRLLRDLRVDTKSRAAWARLLHEHPNARKYKGGNKKGLSKGCFGLKLDRIGSMSGLGC

SEQ ID NO: 1765 - DNA, 1059 bp, Homo sapiens
cagagcgcacccagccggcgccgcgcagcactgggaccctgctcgccctgcagcccagccagcctgctccgcatccccctgctggtctgcccgccgacctgcgcgccctcgctgccgcccgtgtgcgcccctcgaccccagcggcaccatgcatctctcccagctgctggcctgcgccctgctgctcacgctgctctccctccggccctccgaagccaagcccggggcgccgccgaaggtgggtgctgtcgtggggacgccgagcctgggagaggcgtgggaggctgggggcttggagaatgcggcgcgcaggacccaggagagagggaaggcaggcggctgtctcctccgagatgcgcgtgggcgagagccggggagccctcgaagcgcggattcgggggtccacttctccagcctccggagaacatcggcccatgcgcagccccctaccccagtgtggcctgcccggcgagcagcaaagggagggcagggggcttccggagggagcggcgaaggcggccgcgtggcaggtggatgcggggccaagctggccggcatcggtgggggcggctctgggcttgggagggacaccccgcgccggcgggcgcgtggggctggagcatcagagtcccccgtgctgcagccgcgtgtcccttcacctgcccgctctttcctcggacaggtcccgcgaaccccgccggcagaggagctggccgagccgcaggctgcgggcggcggtcagaagaagggcgacaaggctcccgggggcgggggcgccaatctcaagggcgaccggtcgcgactgctccgggacctgcgcgtggacaccaagtcgcgggcagcgtgggctcgccttctgcaagagcaccccaacgcgcgcaaatacaaaggagccaacaagaagggcttgtccaagggctgcttcggcctcaagctggaccgaatcggctccatgagcggcctgggatgttagtgcggcgccccctggcggcggtgagtacggcccacccgacgcccagccccagcccggcccgggaccgcccgccgcccagccagcct

SEQ ID NO: 1766 - DNA, 615 bp, Homo sapiens
cagagcgcacccagccggcgccgcgcagcactgggaccctgctcgccctgcagcccagccagcctgctccgcatccccctgctggtctgcccgccgacctgcgcgccctcgctgccgcccgtgtgcgcccctcgaccccagcggcaccatgcatctctcccagctgctggcctgcgccctgctgctcacgctgctctccctccggccctccgaagccaagcccggggcgccgccgaaggtcccgcgaaccccgccggcagaggagctggccgagccgcaggctgcgggcggcggtcagaagaagggcgacaaggctcccgggggcgggggcgccaatctcaagggcgaccggtcgcgactgctccgggacctgcgcgtggacaccaagtcgcgggcagcgtgggctcgccttctgcaagagcaccccaacgcgcgcaaatacaaaggagccaacaagaagggcttgtccaagggctgcttcggcctcaagctggaccgaatcggctccatgagcggcctgggatgttagtgcggcgccccctggcggcggtgagtacggcccacccgacgcccagccccagcccggcccgggaccgcccgccgcccagccagcct

SEQ ID NO: 1767 - protein, 126 aa, Homo sapiens
MHLSQLLACALLLTLLSLRPSEAKPGAPPKVPRTPPAEELAEPQAAGGGQKKGDKAPGGGGANLKGDRSRLLRDLRVDTKSRAAWARLLQEHPNARKYKGANKKGLSKGCFGLKLDRIGSMSGLGC

SEQ ID NO: 1768 - DNA, 32829 bp, Mus musculus
  misc_feature (1)...(32829): n = a,t,c or g
agagatgctgcagtggctcggggcgcgcacacacatacgcaccctcgcccgctgccgccacgccaggacagccagtggctaaggccggcggggccaagcagccccgaggctggcggcagggtctgctcaccaggcaaccgcagcactgccccagccaacacccttcccgcactctaggtaggtgcctatcatttttgtctgttccagttcagaggtttccctgggtgctgtttcaagaggggctcccggctcagcccttataaatgtcttccttgaaacttgggaggggacagggacaggcagcaggctgggtcccaattgatctctcatcccagccccatagtagcgaccccgcaggctcttacccgtcctgtctaggtgggtggcattctgcaaggcctgatttactggtccaggaagctggcccctgggagggtccagaaatctgagcagacagtggtaactacctgccaaaagggtaggggctccaagacctgccctggaccccagccagtgcccagcagctctgtagggccaggctctaccctgtccctggaactccctagatgaacctgaacctgagtttccaaatgctgagttcatgtggggggctgcttttgccgggtgacctccttgtgaagtcttggttctgctggactaggaaggctattgaagagaggcgagaacagaacacaagtttgggtaaaggctgtccagaagctggaacttgggagagaaactgaggcaagtcacatccctccaagggtgaggctggaatgtagcctgcagttccttttcccctcctccctcctcaaccttgtcttctcagatccctccccctcagcctccctggtgggagggaaggatttgctcaaagtttggctttccaggggattctagagagagggggtaacccctctgcctagccccatagcttatgtaatgggctacaggaggaaacagccccagccagggagtgtctgtcaccacctccaagactggctgcagcactgggggggcaagaggctaaggtgaagccatgcctagagactagtgtcttgggctgcacaggcagcctggacggtgaagctctgcccccaaccctaccccatccccaccccatccccacccctgggaggtagggggagttgagcttccttccggtcttcagggtaaagacgccaaagttgttagtacatttgtaactagtgtgaccagcacagagtggttctgcatgcagtgacctcagtcctgtacaagggtgggtttgaacccttctgcctaggagacaggagagggaactgtccgcatagcctggtcctgagcagctgggcagctatttcgggcactcccccaaacccctattcagatgccccgtcatccacttagcttctgagatgatctaacacttgtcccaggtcctgctcaaagggaccagctacactactaaatgacacgggcagccaagagtggaccacctgtgggaggggcaagtgtgactgaggctccaggggcggggccgggaaatggtccggtggttgaaacaggtgtcatgtttcagggctgcctccgagtcaggagcgttcagctcctcccaggggccccagcggcaacctctaggctctggcagaaccactcagtgcttcttgcacaaggtcaaagtccttcctactgtcttgtgggaatctttgctaatttagaggcagtccggggatgaagcaaacagataggaggggcttctgaagtgatagcatcaaagacactcaaggtcccacttgcctccttcagaagccactgcccttgtcgggaagaagtgaggggtttaaagagaagggctactgacgggactggtttctccccttccccaatctccaccaggccaaatcatcctttgcacctgccatcccagagcatgtactcttcagattccagccctgaggtcaccctcagactgtccccagtggccttcgctgggcacctccacttcctgacaccgcttaagtggaggcatgtgtattagctctgagtccccatgatccactagacagctgtatgtactgcgctggactgactccagatcagtcctaggaagtgtataagctgcaggaaacacccgaaccagcctctatgctgacactatcagccacgcatttgtgagggcttgaggagtacaaggtctttctggcagtaagtgtctcaagccagatgacggatgagaagacttcagagccaatctccaagcatggatatggtggtatttgtgttcttggagagactcagagtggaacgagagcatcagggaagaagtggtttatccacacaaagggaagaatcagagcgaagactatgccactggggtataaggaacttacattagacaatagaggacacttctgggcaggaagccgagccataggacaacctcctgtcacataactgtaaagatggccgcagatctggggtcagtgttgggtctaggcttgagacagtcatgccagaggcaggagttaggctgggatgcaggcacatttcttccagcctcaggccatcctctttcagatggtaaatgatgacatccttgtcatcttcccacatgctggcatttctggttctcccagggggaccactgcctctcatctagaccaaaattccaggactattgctaacttggaacacccacaggggtgacttcaccttcctggaagagttgaacctttctgtggttgaatgagtccttgctacaaaaggagtccatgtctctctgtctactaagcaaggcgcaatcaaaagcaaagcttcaccttaaacctgagtatcatccattccgggacatgctagaatataccttagtgtctgtaccaaccgcatggaccccttctgacctgtagaagtcaacccctgccctgctcagggcacccatcctgatttaaaaccatagtctcctcctgagggaccctgtgttatctcaatgtctgtcaatcccctttgaagttcccacctgaacaggcgtttgctctccactggtctgcagaaaagcacctgggagctggggtcatgggctgggaataagaaggagtctcttctcagtagacaggacaggcatgcaaagatggtcccgctgatgcccgagatcctccccttcctgctttggtccttcagaaaccagttgaagcaattgttcatgctcctccagttttacaaaggagctttccgaggactacaggtagagtgaagtagaaggcgcttgttctggaatatgcgaggttctgggttaaatcctcaccacggggtggggggggatgtggggtttgaggtctgtcttctaaggtttttgcttgctaccccaaattacacatagagaaggattggaggggnnnnnnnnnnnnnnnnnnnnnnnnnnnnnnnnnnnnnnnnnnnnnnnnnnnnnnnnnnnnnnnnnnnnnnnnnnnnnnnnnnnnnnnnnnnnnnnnnnnnnnnnnnnnnnnnnnnnnnnnnnnnnnnnnnnnnnnnnnnnnnnnnnnnnnnnnnnnnnnnnnnnnnnnnnnnnnnnnnnnnnnnnnnnnnnnnnnnnnnnnnnnnnnnnnnnnnnnnnnnnnnnnnnnnnnnnnnccccccccccgccccttgcaaacacttctttacttcaggccctctcccatcccccatccagtggtgcctggcctggcccaccgggcacccggcatcctccacacctctgcttagagccccatcctccaagcagactatagtaactgagagcctcctgggctttgatggccctgccagatagatcctccgcttaggatccagaaccggatcctaagcggagaacaggcattgagctcagtctccctctgtccctggcaggagttgagtgcatgagagaaaaaccactgagagagtcatgggcacacccaggccacattccctaaatgtgtggtgttgggtacaagtctgtcagtggaatatcttcctgccatagtctagagtttgcctcattacattgcatctgtggaatgtgaggaaaaggtctaagtggcaggtgtctctgccgttagcacggaatgtcaacacacctgactcacaaaagtgcagtgtgtatcctggggggtgaggtggggttggggggagcttggttataaggtttagtctttcccaagcatcagcagtggcccaattaccgctctgacctcacaagagtcccttgaggtgaccctctttgtccccattttacagaagactaaggtacaagagattagtactgaaggcagtaactcagagtataacaactagggatcccaggtctcattggctcaataacctgccctgtaaaactcgagacatgctacatgccgaggctgaggtgagcatccaagaggctcctgcaacattttaaaggttgaccgtagatctctctgtgtcttataccatgctccaagcgcgcttccgactatagtgtatgtaatactaccacaccctttaattctctgctctgcttgactgatgaagggaagagctggggcgagagggaactggacatcccaggaggcagcaacagacctgctggactaggtacatttttaaaactggctccagagagatcctcagcctggaaactctgtcatgtgctggagtctacctcatagtctgctgtttccaagctgtccttccttcctctcaccctttgtttcctggactaggaactttaaccagaacccctgaacctcctatcctcccatgtgctagtacctcacagaaccagccccttgatggtgagagtctgtgcccgactgtgccagcctgtgcctgcacccctgtaccagggcagctggcctgggcaagacttggctagctcagagatagctgggccaatctgggcctggcataactccactccggcctcactctgacacaaaggccctctccatcctgggccttctaggacatgtcatagagcagatggtgcgggaagatgactgatctttgaacctgaaagcacatctagtggctgctcttagccatccagtgagtgccataaaggcggggggcggggggggggtcctcagttactgcctcccctgtgctcagcacaatgcctggcccattgttactgaacactgtgatgggattagatgtggtagcacattcctatgatcccagtgtttgagagttggctacagaaggattatgggttgaaggtacgtgtgtgtggagagagagagagagagagagagagagagagagatgaactcacacacacatatacacacatgcacccacacatacacacatatatactcacacacacatactcatacacacacacacacacatgcattcacacacacatacatgcaatcgcacacaaatgcactcacacacacatatgcacacaggcacacacacacatgcatttacatacatgcattttcacatatacacactcatacacatgcactcacacacacacacacatgcacgctcacaaatgcatgcactcatggtactggaaatgaatgcaaggcatagtagagtctggctgcctcaccttcatggaagcagaaagctccaacctttactatatatatatatatatatatatatatttagaaaaaagaaaaatatatgtatatacatactatatataggttgtaagccactatgtggttgaactcaggacctctggaagaacaaccagtgctcttatctactgagccatctctccagccttactccaggcttatatgtgggctttcctagtttacccaggatgatggggctcagcatatctcttcacactggctgatatacagttcatcccaggagaaactgcatatcttcctgaccccacacacatctcctccaaagcctcctctaaggtcttggtccttagagggtactcagggtatttaggccaggctggtggatgataaaaatcctagattaaagtttaaagtatgcagtgggattggattctctctaatctacagacatcaccagaaagacaacatgaaatcttgaccactacatggcaaaggtgagagcactgtgacttcacctctgccttgctctgctgtgttcaggataaatgccctctgcccaagctcctcccagcctagccattgtgttggaactggagctccagccctggccagctggcaaaaggcaagagagcaaatgaggagtggcttctccatgcccagagacaagttcacgattccccagacccagggacgatttccaagttcctcaaccagggagcctcctgggaaagtcaagaacaggaagtggaaactagaggagatggaggcagaagggacatctagaaccatcctctgcctccctctccacaggagactgatacaggtccagagggctcggaggcaacacagccgctccgaggcaactcggataaccagcacaggtgtagccacagaaccactctgtaatgctcacctagttcccattctgctgatggggaaattgaggctccatcagggaggataacttatttaaacccacggagctgtacagagatgaggtcggggagccagagagaaacctcagaggttaggaatatgccctgctctttcctttcgagggcctgcgctagtgtgtgcccagtgtggagctccagggcgttcaacaccctcttccagcacgtgtgagcacctgcattcacacacaagtacacataattaaaaataaagtcaaggcgggtggtggtggcgcacgcctttaatcccagcacttaggaggcagaggcaggcggatttctaagttcgaggccagcctggtctacagagtgagttccaggacagccagggttacacagagaaaccctgtctcgaaaatccaaaaaaaaaaaaaggtcaatctttataaaaaaaaaaaaaaaaagaaaagaaaagaaaaacagagatgaaggcagtactaccaactcttgcctactggttttggttttgcaagccttgggtatgtgggctccaaactgagccagcacctccctgtgctgtggacaatgcccccatatttgggcagcagccagaagtacacttgtgagatttcctatgactagatgccctgctgacccggagaccttggtgtgcttgtgtgtgtgggcatatgtaccatttgctgtgccaaagannnnnnnnnnnnnnnnnnnnggtaggaatatgccctgctctttcctttcgagggcctgcgctagtgtgtgcccagtgtggagctccagggcgttcaacaccctcttccagcacgtgtgagcacctgcattcacacacaagtacacataattaaaaataaagtcaaggcgggtggtggtggcgcacgcctttaatcccagcacttaggaggcagaggcaggcggatttttaagttcgaggccagcctggtctacagagtgagttccaggacagccagggttacacagagaaaccctgtctcgaaaatccaaaaaaaaaaaaaaggtcaatctttataaaaaaaaaaaaaaaaagaaaagaaaagaaaaacagagatgaaggcagtactaccaactcttgcctactggttttggttttgcaagccttgggtatgtgggctccaaactgagccagcacctccctgtgctgtggacaatgcccccatatttgggcagcagccagaagtacacttgtgagatttcctatgactagatgccctgctgacccggagaccttggtgtgcttgtgtgtgtgggcatatgtaccatttgctgtgccaaagaccttccttccagcctggtcaggttatatactgagttccattgtgagtacgcacgtatgctcatctgtgtcatgggtgtccattggctcctggaggcgaacagccacaacggttctcaattagttgaatgcgactcacaagcaacatatgtgctagatactttactaagtatggtgctctaagacggacagactacagcctctcctcttaggggactgatattcttccactggagacaaaccgttccacaggcaggagctgtggacgatcaagggctgaattctgtattcaggctgggataccttgggcgcttccaggcaggtgaggggtgaacagcgctctacagtatgaggacaccttacttatagagaaattatttggggtgtgggagaagggtgctgtggatgatgggggaatcgagagatgccaaatgtctgcatcctagtgcagggggtgacatccagacacacttcctgacaagaagcagagaagatgaggctggggtcacatgaggagggagtgcttctgctctggaccctaacccctgcttcttgattctgccaggcatccctgccacacacccctggcaggctccggacactctcccccttgccttttggttgctggtgggagcccaggtggaggcgggctggaaggcttttcccatgagtggagtaggagggaggtgggacacagtcttccttctcagcccacagggcaggggtcctgactctgctatctcaggaagccccagcgagccagagctgaaaggacctgaaaaagcagtttcattgaggacacagatgtagacagcaagttgcatagctaattagtggggacaaacctgccttgccctgggccttctgcaggctccacggcagggtgggctgttagactctgcagccaggtgctctggtcctgtggcagctctgagaggggggaatgggctgtgtgaccagactcaccccaaaacctacaaggtagcttctgggagtccttgtcccaggaaatcttcccagagagtagatagggaggtgaccccgtccctgcccttgcctctctgaatgaggtcttcgtgtccccagctgctgacctgctcccggtgacctacccagcctgactttaccaagtctctgctatcccagtgtaagacagaggctcctctgagagtttccttaaggctagtggtacagaaagctggtggatcactaacccatgtggtgggagtgtggctgataggactgagatcatgactccatttgaaacacctaggtgccttacctaggcaccacaggctggagcaaagctaaagtgagcctttccttattttgagaaaatcagtcataattcagagactgtgcagctccagggggacttagtggcccccacctgggcagctatgggaagaaaagtaggaagagagatgtcccgatccccaggtaccagaggaggatgtcattaacgccaggcaaagccccacccccttccccgcccccaccgccccccagggctcctccagacacagagagatcaccagtgcaagcaagcgggcaggtgggttcttgcctgccaattagttccgctttcacttcctgatcagcacctgaaggctggagggggggggggccaccatgcagagccagactcccagggggaccggggaagcactcagccctagaagagctccatggtaattgccaagcccctccctccctcctctgggatctgaggaagatgagtgctttagctctacagcccaggcagttcctaaccagatgtgcctgcagctggaagggcaccgatgctcagcgcccccatcctgtcttctcaggtgtgtctcagtctccagttgactctcctggagctgggctgcagctcctctcttctggactctgcctttgcctgaaacacccaccatgggagcaccggccaggaaaagggcaagcttgctgctgctgctgctggccacaatggctctggtctcctctccaggtaagagcagctgattatagggttaaatcatgactaccacttaggtagcaattcctctgcattgctgaggccatttccttgctaaattcttcccatacacgggtcttcccttccctttgaagttgggaggagaggaaatgaatcgaagatgaagaaaaacatgatccagagactgagtgccacagcacaatgtggcaaagccagatctccatgctatccattggagatgtggcctctagaatgtcactgcacagtgtggtaggcatcgccaagtgtgacccctgagctaagatgtgattcaaatgaaaatgatgccttcagctggactcgccacatgtcaagtgctctatgggacacctccatcatatccagacatttttcttaaagaatgctccaggaccctggatccaggggaacagcagctaccccatagaatgccagggggcttccctgagggagcctggctgggtcgggcagagagcagccagatgaggcagggcagggttgctgacagagggtccagtctccatgctactccccgtgctcacccagcccagagatgggaagcagctgccggaagtcagaaaagggatccaacatctggagagttcccaccctggagctgggcgtctccaaggcttgctgctgaggggccaaaattcaaatcaacaggagtctgtttccctaaagagctccaagggagaagaagcactcatcccacagccctggagtttagaacgcaccttttgcccatgaccgtttgagacacagccatacctgtctctgctggcatgctcaaaggctcctgccaggtccctgtcgctctgatttaccctgtacccacggtgcttcatggggctgctgagaactggatctaactcccacaccttgatcctggctctctccaccagactggaggaacggccagggtgggaggctctgacggcacagaacgagatcctgtatctgtctgctgtagggagagggagaggatgactctagacgccgctcctcctgcctccatctcctctggtatccatgttctactcttgactctcattgagaaaggccagaggagagggtctccagcaacccctctcttgggggcaactccctttggaagcaagaggtgtgagcaccccttggggaactcaaacccaaataggtcagaagacaattgccaaatgcctagggccaggacctgggctgccacctcccagtatggcccgattttagatctgctccttcctgagacctggaaagtgcttctctgcaattggcctgctcaacagatcctagcatagatctctgggacactcacacccagggcaaggagaggcgtagcatcctccctcacaaagcatctctctggcttctttcttccactgcagtgtctcatgactcttctggggaaaagaataaccggggcagagtgggggctttgggggcaggagccacagagaaggctgcctttgccggggagtatgtgtgtccatatgtgctcacctgtatgtacggcagcatagacaggtctgtctgtagctacttggagtagtgtgggctgtgtgaggcggtctgtagaccagatagaggctatggggtgcgggtgtgagtgcagcacatcttggacctccatgccctcaactccagctcctttcagaagcatcttttacacccagatttctgggtttcattcccagaacttctgatttcaggcctccagaatgaagccagggcctcagatggccccaaaaacctgaagtcaggaactgtagccactgtggttaaaaatgtgggctgcaaggcgaggctggatgagggcagacctcctttgctttgaagtgcagaaagttattaaactttctccatgttggagacataagaagcacctcacttcttagatcactttgagaaggaatttagagtatggtatcaggcagccatatatgcaaacagatcaacagcacaattcttatcatggcttaattattatcaatgatacatgcatatgggatgagcaggcggggctattggcagctctgcctgccttatccagaagtgtgtgctgatgcatatctggccatctgattggcttagagagagacacctgtatatgagcacatgtgtgttgtgagaacattgtacgatcatgtgcaggtaagacatgaaggtgtgtacatgtgagtattggggtgtgcgtgagggtgtgcacttgactgagtgtagaagagacagccttttcaagatgaaagacaacaatcttaatcttaactacaggtgtgcccagaccccactctgccacctcccaccacccagactgagttcctggaagctgctattgcctacggtggttgttcccagcagcctctccatccctccttctcctgctttccatcctcccctctctccaggtggtcccagctgggacagggtccctaccctccatcaccatcattaactcgggattaagctgggctttctagggggagatgatgcagttgctgtcaaacaccacctctgaggccccaggcagcagtaagagagagtggcaagcaactgggggaggggcagacgacataaacaggactcaagggaagcccttgccagactgttctgaaagtcctgcctcctacctcatttctcattcagagggctgcttagcagatgccccaactcccaagaggccagagctggccctcagatgcagcagagggaccacactcgctcagaagagggctggcagctggatgtgcccagaaagaaggcactaattggttaatggagttccctcctcccatcccccacccaacacggaaggtctgaaatcagctgcaggagagattggggccaattagggggcctggctcccacctgatctcgcagtggtggaactcccactgtgcctatgcgggtgtgaagtactgcccaggcccctgcctgctgatcctgtgctggtgagacaggacaatggtgtgtgcaaagcaaggccctggctgagacagggctgggaagggcaagtgtgaaacccatttgctaagcaacatcacctggctgacacagagtgactggatgaccactgggcctttctttcctgagacgggacatggttataaaactgctaccattcgacttgctaacccagccaacatctagctgtccttcacccctgaccccagttgagtctaacagccaggtgctgtttgcatcctgtgtcaggccctccctatttttcactgttagaccctgttatggacctggtgttagcattctgtctaaactccaccccacagctacctggcaacagccagataggcctgacccattataaaagggggctgcttgccccctcctttctcttgttcctcttgctctcttggtctcactctgtcccctcgctccttcccctccttccccattccctacccccctccatgtgctcatggccggcctctacttctctaatctttctctgcctttctctgcctctgctaccctcttgactcccctcctcatgccctgaataaactctattctatactataccatatatagtgcggttgatccctcagggggacaggatgccttgacatgggcccgctgagacacccccttccccaacacctcactgcccctcaatatagaacatattccctctttctttatctttttataaacacattacctgagaagtgaatttccactcttttcataggaaaacatcagatcaatagaaaggagggcctatagcttgtccaaggtaatatagccagtaggagacccagcccagctcccagatgagcacttttcactaaactacactgccctaggagggcactggactccaggaacacataacactcttttcctctgtttcctgtcggtgtcttctcatatgcctcagctgtgtgagatttcctgagagtcttaccgaatcttgtccctaaagcactctgcaacatggcaccctgtactgtccgttctcaattttcttccctggactgcaaagccctttaaagaaagggactgtgtgtctgattcatttcacagcccagttccaggtatacagcaagtgcttaatatgtgactgttggtgggtgagtgaatatgccagtgtagattgatgggcctgcccagtctgttttaaattaattttaattaaattaaagtttggttccttagacacattccaaaaccctcaatagccacacatggtccatagctacctactggacgacacaggaaagggtgcagccccagtaagttctgcccttgacattggacttcgtctcagacattgaggctatagtggtaccccctgtttgcaggatggagtttttcccagggaaccccagctacctttggacccgtctttgaagagcaacctgttggcctgctattcccagaggagtctgcagaggatcaggtgacactggcgtgccgtgcccgagctagccctccagccacctataggtaagagagcggggaggctccgggcagccatatggcattccttgacaccagtcttacccattgagatctgaagtcccatccccacttcatcccggctacaggtggaagatgaacggcacagagatgaacctggaacctggttcccgtcaccagctgatggggggcaacctggtcatcatgagtcccaccaaagcacaggatgctggtgtctaccagtgcctagcctctaacccagtaggcactgtcgtcagcaaggaagctgtcctccgcttcggctgtgagatccatgggagccaagctgttgggtgtgggtagacggggccaggaaaaggttcccaggaaggacaggtggcggtagcctcgagccaggctttcctgccagcaaatggcatgctagcgactgcttcttgcccatggtggaggaactggggcgctgcatgcttgaagacagttgcctgagccctcttctccatctccagttctacaggaattctccaaggaggagagagaccccgtgaaaacccacgagggctggggggtgatgctgccctgtaacccacctgcccactacccaggtaagtggggattctgggccagcgcaggactgggagggggaatgtaccagaaaggacttctggatgctagcatgggagaggaaaaacagaacaggaggtggtaagtcttaactttcaatggctctgcaatttcctagctggactgagagtgttcgcagttcatcgtgaggagagagtcaaagtcatctctcccctctccacccccagcccctgatcagagctgcaagttctcatgagaagacagagtttgcagcatgtttggggtcttgcccagattgcctgtgatcccagtacacccttgtttcctcagactccttcctttctaggtttgtcctaccgctggctcctcaacgagttccccaacttcatcccaacggatgggcgtcacttcgtgtcccagaccacagggaacctgtacatcgcccgcaccaatgcctcggacctgggcaactactcttgcctggctaccagccacctggacttctccaccaagagcgtcttcagcaaattcgcgcagctcaacctggctgctgaaggtcaggatctagggtaatggaggctgaaagggtcaataggccttggagaaatggtattctaccaagcttaagaattgcagctcagaatatatgaggtcctgctgccgggtctcagatccttgccccaggccccccagaaaaagagaacatttggagattccaaatatttatgtggtgatctgtgaactttggaaggcatgggccctaatacaaagcacctccctggagccctttgcatgtggttcacacagtcaatctctctctcccctccaccccccccagatcctcgactctttgctcccagtatcaaagcccggttccccccagagacgtacgcactggttgggcagcaggtcaccctggagtgctttgcctttgggaagtaagtaccatcaggacaagagtgtcctgggcccaggcagggtttcatttcaaagcccctcaagagcaggagggatcacagagttaaagagaacaaagtcaatagactaacagagtcctggacacaaaacaggcaccacccactacctataaaacaagttctgccagtgagacatcacatacacacacacacacacacacacacactcacacacacacactcacaaacacacactcactcacacacacacacatacacactcactcacacacacacactcacacacacacactcacacacacacactcacaaacacacacactcactcacacacacacacatactcactcactcacacacactcactcactcacacacacactcacacacacacacacactcactcacacacactcactcacacacacactcacacacacactcacacacactcacacacactcacacacacacagatggaggggctttataggcatgagggagtcatgtggcctcccaacagtaaacagtaaaatcctaagcagtttaaggagcaagccagggctagcagcagaaaaaacagtgtgccgaccccatcctgctggttcaaagctcagcttcaacacttgctggctgggagacctcgggcaaacaacctcacatctgaggctcagctctaggactgacggatggtcagggttgacagtggctaaaggattcttacaaagatcagttgggtccatggataccaggccctgagagtggtgcttggtgctttgacaggtgtggcatgaatgttacattagccatttcacaaattacagcagaaaggcttgcttctctttcttgctgtcccggaaaaaggatcctctagagcaagggtcattgctttctgctgtgtgggatgttcttgagcatccaggaaacatgtataaatgagcagggtaacatgttgattcctcagatccaatggttccctagcccattttaatgtccaaattactaataactaacatgccttggaaaggcggggtgatgataaaagggacctataaaagcctgttcctagtctcgtttgtgccctcttcccgtctgtcccctcccaaacaggagtccccttcaccttgtccagtgcttcaggagggcctgcgagtgtgagcataggctctgtggacactcgagaaacatgctcagctcagctcatcccctctggctctttctcccctgccagccctgttcccaggatcaagtggcgcaaagtggatggttccttgtcccctcagtggggcacagcagagcccaccctgcagatccccagtgttagctttgaagatgagggtacctatgaatgtgaggcagagaactccaagggccgtgacaccgtccagggacgcatcattgtgcaaggtactgagctggagatacctccgtcttccctgaggaagcagcatgaaaatccaagagactgggaggccttctgcttgagccttctgacccttgccaggactgctaaacatagctggagaggccgtttcagagctcagcgggggcatacagaaagcacacaagtatttcaaaagatttagttgctaaatcagtccctggcacaaccagagagtgccagcttcttcgccctcatttctttgttctctccagcccagaataccaacagcgccctctgctgtcacttacaaatactgcagccttataattccctattcctctctttcttccccacagctcagcctgagtggctaaaggtgatctcagacacagaagccgacattggttccaacttacgttggggctgtgctgcggcaggcaagcctcggcccatggtgcgctggctgagaaacggggaacctctggcctcccaggtaggaaaccaaggcttcctcccacacgaccaccctcttctgctgcctggcccgcttaccctgctgggccaaccaaggggtcttgggacgttctggtgcttcttctcacagagagatacatggccacaggtgggtcacctgtgtagcatcacagagatctgggatccctccatcaaccagaaatgtaaccttaatctagcctccaggagacctaaaggaccaggcagccctgaagtagacctatattcatgaaccctcatgctgagggatgttagcttacagcctctgcagcacaccaccaccatcaccatcaccacccgcccctgactccttcctggcctccagtggtcctcatcttcctgccttggctcttctgcacagaaccgggtggaggtcttggctggggacctgcgattctctaagctgaacctggaggactccggcatgtaccagtgtgtggcagaaaacaagcatggcaccatctatgccagtgctgagctggctgtacaaggtaaaggacccaggaggcagggacagccctggtgcttgaaggttgtgtctggctgggcttctccaaatgcacacttgcaggctcgtgtgctaacatacacatgtatgttctttcttgttttccaatggcccctgagtagcaccagtttcaagacatgagactgagagttttccaaagacatggtttttgggttttttttttttgtttgtttgtttttgtttttacttgctgcattgaaaagatctgatctgtatttaacctagttccttcagctctgtggcctgtggcaagttacctgattctatgcctcagtttcctgattttaaaaaatgcttcatcctgtccttgaacagcgctttgaggggaattgaaattcaaagggtgaactatgacaggcctgacattcagacggggacaaggaacaccagccacttgagcttacaaggcacgttttctctgctgcaagatgaacgttagaagcctttattaagtttaataaggctcaacaaagacttactcgttttattttttattttatttgtacgaatgcctgtatttgtatgtgtatcacatgttacagaagtcaaaagaaagtgtagattctcctgaaactggagttacagatggttgtgagccactgggcactggaaattaaactcaggtccatgctctgacttactgagccatctctccagccccaagactcttcctttcattcaattattcaaccaataacttacaaagcatctcatgaggagcaaatacagtagtacttaaatacttaaagtactgtacaagaaaagggagaggaacaaacttagaatttattccagagaaccctaaaagtatggttaaaaaaataccaaggacagcagtggtacccaggtgagcaggttagatggggtggtcaggaaagactctgaggaagtcacgtttagactgtgacctgagggagacagacttgtaaatatctggggaagtttcaggtaatatgcatgcagacacaatgatccaaaggcaggtaagacttggcattcagggggttaaaaggaaagctatggggcgtggaggtggaaagatgactcatcagttaagaggactggctgctcttacacagcagacccaggttccatccccagtacccacagggtggctcacaactacctctaattccagttccagagactcatacgccctcttctggccgccttaggcactgcatgcaagtggtacccagacatacaagcaggcaaaacattcatatatatatatgtgtgtgtgtgtgtgtgtgtgtgtgtgtaaagtaaaaataaaagaagtctttaaaagaaaaagggaaaaagttgaaagcaagacagacagttggagcgtgtgagagggacgagtggagccagatgtgatgacacaggggtagatgagttctagagatgttgctgccacttgacaagttggtctccagaggccagatgcttagcacatagccaggtgacatcttagttgaggtgggcgggtggctatctcgagggtgagtgtttgagcaccctctctcctgcagctctggccccagacttcaggcagaaccctgtgaggcggctgatccctgcagcccgagggggagagatcagtatcccgtgccagccccgtgcggctccaaaagctacaatactgtggagcaagggtactgagattctggggaacagtaccaggtaggttctgtgtgccaccgctgagatgacgtcttggaggtcagtccccttccaatggccacggtgtgtccctcagttgactagatctttttctgtccttgctgcagagtgactgtcactttggacggcaccttgattatcagaaacatcagtcgatcggatgaaggcaaatatacctgctttgctgagaacttcatgggcaaagccaacagtaccgggatcctgtctgtgcgaggtaaggactgtggtctgttcagatgctgggatgctgttctgccaaccatctgctcttggcttcctatacatctgctttcaaggcaacgtcagaactcagtctctcttgggaccacccctggccagcctccagaatctggccactcatgaatatgcatctcttctaggggtacaggccagagcctctctccttcctgggctttttccctcacagagccttgttttgttgttgctgttttgctttgtagatgcaacgaagatcacgctagctccttcgagtgctgacatcaatgtgggtgataacctgaccctacagtgccacgcctcgcatgaccccactatggacctcacgttcacctggaccctggatgacttccctgttgactttgataagcctggaggtcactaccggagagccagtgtggtaaggcctgaggcctcataattctccctccttccagataagacaggggacttgagatggcctcagtcattaccagcttcaggctttccaaagtttcccctaacccccgaggccatgccgagaaagctcaccctaggacccaccgccacctttcctgcatccacccaaggaccacccttctaagttagaatcaagctttagcattccaagtaccccaggagattctctccactattgtccctctcccctagtgcaaatgccatcattaacttggctcatgaagactgtcttatgtggcacgctttgatgtccagtggtaccaagtagctcattcttcccattgaacagataggaacactgaggcacagagagcatggatgccattcagccagggaatctaggctccatttcgtcttgtggcctattacactagtcagggcttcctcctgtctcatcattccttgctgttccctgtgcacagaaggagaccattggggacctgactatcctgaatgcccagctacgccacggagggacatacacatgcatggcccagacagtggtggatggtgcatccaaggaggccacagtcctggtccgaggtaatgggagtcagccaccacaggtctcagagaggctctaggctttccgactctccccacctctcttccctccctgaaggctgacagaagctggagagatggacacttctgtttagtgcctgtgtagttctttgtgggtcctaaatgagtagactatgtcttccaaagccatgatcaagaaagaaaatgtaccctaaacacccctaagactttacctcatgagcccaggagttccaggtccagtacagggcaaacttgtacacccttctgtgagccaccaagtctgagatgcttcgctcctcatctttctcctctgcccccatcctctggcctcccaccctatctctcctgccctctgatgccccatctagatactgagtcagcccaagctgaggctagataaaaccgactcaaactgtccacctctgacccagggtgctctgcttcttacaggtcccccaggtcctcctgggggtgtggtggtgagagacattggagacactactgttcagcttagctggagtcgtggctttgacaatcacagccccattgccaagtacaccctgcaagcgcggactccaccctcagggaaatggaagcaggttcggaccagtaagtatgaggcaccatgtgggtcagttttaataaccactgtgtgcacagcagaagacaggggtcaaagggtcaaggctgaccctaaggctttgaaaagaattaaggtgtgttctcttacctccagggagaacctaggcaggcagggaaaccttcatagccaggagggtaaggagagggagagctggaggcagcagccttgtgttgctagagaacgccggcatgctcaacatccgtggagggaagagcaaaggccctgtggcatcagagctcactagcttttcagacaagcttttcagtcaaagagtaattgagggcttagcgaacgaacggtaggaccatgctgagggcagaacacaaatggccacatgggtccggaacctgccaccatcataaatggccgctggccgctgactgcctgggaccttgcagatcctgtgaatatcgagggcaacgcggaaactgcccaggtgctggggctcatgccttggatggactatgagtttcgggtttcagctagcaacatcttgggcactggggagcccagcggcccctccagcagaatccgcactaaggaagcaggtgagtgtctggagttctctgcaaagggagccccagcagagggagtccccagcagagggagtccccagcagagggagctctaggctctagcagggggggggggagcggggggggcgggggggggctggggagagctccagcgctgtggggggaggagcccnnnnnnnnnnnnnnnnnnnncccagcagagagcgctctaggggaggagctccagcattgtggggggaggagcctcaggaggggaagcttctgcagagggagccccagcagagggagctctggggggcagctccagcggtgtgggggaggagctccagtagggggagccccaacagagggggcatcagagagggtgggagggaggggcagccaagggacccccagcagaggaagcagaaacaaagttccaatctgcttaccaggcctcggctctctggtcaataggcgaaagatgaaaagttagagacaagctgctgcttagacaaagcgcctgatccaaaccccttgctgaaaagcacgcctgcaggcagatctgtagtcattgttttggcttagtatttaaagccagaagagctgatttgaacaaggatcacactgtgagagcctgctcttgaacctaggacaagaaccttgagtgggtttttaagtgcccacaaactgcagaaatcagctaatgaggaaggtgtctgtgtgcatgtgtacactcgtgtgggtgtggacacacattcactgtgcagggggctggagaggcagccagactccaggccctgtttcactggcatctgtggagcaggaggcctgagaccctcagtgaaagcgtttgtcagagtcaggggagagtgtgaggagagaaccaggaagggctcaggcatggccttcacctgcccagaggcagctgctatgctctcaccattcccagcggagggcctgggaccacacagcggcatcgtggtcagaatcctgtctccctcctatccagccagacctgtgcttgcgtgtggtggagggtctacctccatgtctcctacctgctccaggctgactctccaggttctggaaccacacaacattttaatctggcacccgtgttgagtaggaaactccagaaggcatgctttctgaccgaacttcttagggattctagcatctcagaaactgatgcgcacagacgcgcaaagggacagcgaggatctttaaagtcataagagcagagatcacgttctagctgggcggtgcgttagctgtgtgaactttggacaagttgcttaactgctctggacctcaggctttctgtcttaaccctggccctctgtgagctgacagaagccatctttgtgtttttcagtcttgtttaataccaaagacgggagattaaatcgagaggggagagagggaaggagagggagagggggagagagagaatcagggaaataccttgggataccctctaacaaaatgtattgttttgttgttgtttgcattaactggcattcaaaatcctttagtctcatcagctgaatgaagcaaactggagttggtctctggtttagctaaagccaacaggggtaaggatgacatataagagtagccattccgtgctgcctggcctctcatttcaattcttctactttcaccttgacagacacatcatcatcatcatcatcatcatcatatcatcatcatcatcatcctctagagagtataggcagggcccagaaaggttaagtgactaggcagaggaagtacagcaaagatgggaattgttctcaggctagcctgactctgcagtcatgcacagaaggactatgggaaaataacttaggacaccccatctaagatgatccaggcacaggctaggggattgctcccccctttctgcccattaacatgacccatttgtgtttcttgccccttacagtcccctctgtggcaccatctggactcagtggagggggaggagcccctggagagcttaccatcaactggactgtaagtggacagggacagagaagcaggcaggtgccttgcctctcaggagtcacacccctttccctcctgacatagtttgtctacagacaaagtggcagcaacagaaaagaccgatgaagtctcatttggaagctggcagcttccttccctccccttgcatctctcacaggcatcccggggtcactcctctgggtgaagactgggtggagtccgatggatgggtagggacacacacccatgacccctggcccacaccgtgctcttgccctcagcccatgtcacgagagtaccagaatggagacggcttcggctacctgctgtccttccgcaggcaaggcagctccagttggcagacggcccgggtgcccggcgctgatacccagtacttcgtctacagcaacgatagcatccatccctacacaccctttgaggtcaagatccgaagctacaatcgccggggggatgggcccgagagcctcactgccatcgtgtactcagcagaggaaggtaggctgtggggcctggggcctggccctcctgcactccctggcacagggaaggagaggggacaccatgggaggagaagaaagcctggggtgcacttggtgtcccctgggcttcatcctgcgcactaagcttcatcttgggccctgggatttccccccaaatcctcagcacagtcctagtcagggtcagtcactctgtgggatgcagaggtggcttggcaacatatgcccattctttatttattctccctagagcccaaggtggcccctgccaaggtctgggccaagggttcctcatcctcagagatgaacgtaagctgggagcctgtgctacaagacatgaacggcatcctcctgggatatgaggtgagcgtcccctggggccggaaagaggcaaggctaggctttccagagtagatggcaacatctgacagcttactagtcattcccctaggatcactaattcctcagtgaggggatcaagagggaaggaagacgaaacacccaggcccaatattgtcagagagagagagagagagagagagagagagagagagagagagagagagagagagaggaagagagaggaagagagagagagagagagagagggagagagggagagggagagagagagagagcccactatcaggctgtgtctcccagggttggctcctgagatttgcacaataggttagacagatcactgggagatgctagctccactcttagcccttgattgaagactatttaaggtctgctattctgctggtgactggagttgtgtatactgggcacgttacaagcacacacatacactttgtatcccagcagatgctccaagatagcacctgagtgagtgagatgaacactgcattgagagccagcctccggggactgaagtgtaggaggcagaggcagccacaggtctgcagtagaccctggcaccccattggtactagaatgagcttgctgggcatggcctaagtgatggggggggggggagctttagaaggcttaaagatgacaataaccgccaggcagtggtggcgcacgcctttaatctcagcacttgggaggcagaggcaggtggatttctgagtttgaggccagcctggtctacagagtgagttccgggacagccagtgctacacagagaaatcctgtctggaaaaacaaacaaacaaacaaacaaacaaacaaaaagatggcaataacctgggcctttctcacctctgctcatctccccactagtcacctacttctttcctcccatatcctggacaccgtccttggagtagacactgttgaatagccacagccgcattaccattctttctaggtcacctgacctagcgtgcaggttatcaaactagaccagccggagtaccagagaagcatggagactgtgcagccaaaagctttgccatgcactttaacatatcctgccccttgtagattcgctactggaaagccggggacaaagaagctgccgctgaccgagtgaggacggcagggctagactccagtgcccgagtcaccggcctgtaccccaacaccaagtaccatgtaactgtgagggcctacaacagggctggcaccggaccagctagcccttcagctgatgccatgaccatgaagccccgtgagtgccagggatgaggaagggcatgtgccacggggtagggacaattcctgccacatggttagcaccaggcagaagcaagtcagaggacctactgaacatggccatggcctctgaggcatcttctggatttttgtggtgacagattgttctgagaatccctgctatatgggtgggcatcagaaaggggctggctagtggtaaaaggtggccgcagaagcatacaacagtgtccccaatctccccacccctcaccccccgcagcaccacggcgacctcctggcaacatctcctggactttctcaagttccagcctcagccttaagtgggaccctgtggttcctctccgaaatgaatctacagtcactggctacaaggtgagaaagggcatgcaagcctgctatgaggagaaatagctcctgtctttccagtggtcacagggacctgcaatccctagcagtgtggcatctggggctaggagagacagaagtatagggactctgggtagttcacggtagaggctataaaaacacatacatggtactgctgcatgagggcagggtagggatgggctgggggggtctgaccaggcagcttagctgtttgcacacctacctcccactggtgagcttgaccaatgagaaactggaggaggcaggaaggaccccttgagggtccaggaggctccatctggaaacttctatcccacagatgttgtatcagaatgacctgcagccaactcctatgctccacctcaccagcaagaactggatagaaataccagtacctgaagacattggtcacgctctggtgcagattcgaaccacggggcctggaggggatgggataccagccgaagtccacattgtgagaaatggaggtactgcccctcccttccccctttctacctagcccctcagcagtattagtccaccagatactggtcaagggattgtccccaagagccagctctaacctagacaccacccctcccccacgagaaaggaaagacaggcaatgaatggtgccatgccactgtcccctccctaccctagaaccaccccaaggtaaggagggaatacatcttttttatggggaccaagaacgaaggtcagtgcttcatgggtaaggctaagaacatcactagccttcggttcttaaggcctccatatgactttcctccagaggcctccgggttcttttgtaagggcagggctgggaggctcactcagccacccagtttctaccactggctggtttcaggcaccagcatgatggtggagagctcagccgtccgccctgcccatcctggcccggtgttctcctgcatggttatactgatgctcgccggctgccagaggctctgatctcaacgctgcccgccacgcccaagctggacacccaccctaacagacacagcggctggccacagcccccctccaacgccaaggtggtccaacactgcctgagagtggctggcttagacaccttctcccaacagtaccctttacgtaggaggtaggatatttctattctgccacaggatagaaccaggcaaggaatttttctttaaatcaagaggcactgggcagtgacttccatgataatactagacctaatgcctggaccctctggggtcctggacagaaggaacaagcctttggatagaaggtatttgacatacatcttcagatcaagtggatggccctctggggccacaagtgggcactgccatctctcatctctctgggatgagagtcccaggcccagcaggaacatgggcagcagtgggctatcaatttccctctatgaagcagagggacctttcctagtccttgctggagaagcaccagttagtccccacgtgggcttcgtggctccccggcagtcctgcttactcagtagccaagaacaaggccctgggttactggggataagagctctaaagggttgagaggctacaccacctgatggaaaggggcaccagactgaagcccattcaccaccccggtggcactgccctctcagccagcactgccatccctgccatcctccagatggaatggtggagtgacagggccacttgaggtggctatgtgactaaagggcttgtctcgagttgccttgcctcatcgggatgctcccttcatggaccctccagggtaggggcaggcgacgcccatctgaatgccgtgctcttcccttcagctctgctgcagacttgtgcctgcctcctcctcccataactgcaggccctggaaaccagctctcaacacagcatccattctttgtcctgggatggagaggcatctgagaagggtcagcatcaatgtggccctgcctgcttccaggaataccctccatcacctggccacacctgctccccaaactgcctggactctcttgggtccccggaagtaaagagttaatgaggtggtggaggtggaggcagcctgccttgagctctgggtacattaccagtgacagcccagactacagaagctgaagaagccttatagcttgacttatccataccttgcccttaacagatgaggaaacgatgccgggcagtgctggcgcacgcctttaatcccagcacttgggagacagaggcaggcggatttctgagttcgaggccagcctggtctacaaagtgagttccaggacagccagggctatacagagaaaccctgtcttgaaaatggaggtccagaaagggttaaggacttcttagggtcacatgatctgtaagtgacaaggcttggtcaagaaccagagtctcctccccacctgtgggaggctctgtggaggagagaggtgtggtgctgggcagtcgccgcccggtctctaggatgagccctctgcttcaagaggttcagggtgctgagaagatcaacatggatgctctcagtccaaggcacaggcagatgctaggagtcagcggcctgaggctggcttctgccgggaactcagcagggagagctggctggaagcctctcaggctctctcttttcatttcaagaaaagaagtcaaagtgaggacagagttccctagaccaggactctgtgcagcccgaccagaagtcgccagtgtccatgccctgagcccgtgagagcagcagagcaggcgtttcaagaggcgcttgccctgctgttccttgggccatttctgtagtttacagttagagctctattttgttatgggtttttaaaactttaagccctgctcttttttcctgggcgggtttatgttagtatttacccactacaattttttaaagatgtccacacactcacgtacctttccccctaccacctccataccttcccctagctaaggactgcttccttggagctgattaaaccctccctcttctgctcccagcacctcacatacaagggtgctaggggctcagccatgtgatcattctccctcccgtgaaccccagagatggtccagcatccctccctccccatcctatgctggctgggatttggctcgggcctagccctggaaaaccctagctagccctggaaaggggcacctgaaaccttccaaggtttacctatttctcactgccttggatttgtggggtggggggagtgctaaagaaatgggtatctagtgtctgggcagggtaagtgaacctggtcagggaggtgggaggctacagcccctaagcttttcttctaacaaggtccatgaaaagcaggcaagctgctgggagactggagaagaggaaaaccttagccctgtgcaggtagcatttgttgtggggaggtgaggctgtgccagcagctttggagcttcgagtgttatctaaggtgtaaggagaccgcaggtgactcgccaacgtgagcttgtaaatagaaaaaaaaaaagcctcttgctgaggaaacttggaccttaactggcttgggaaggagggctagatcaaatggcttctcagagtccctctcctgccaagggtcctcttgacttctgtacaggctggggaagcttttggactggcccctgctatggtcctgactgctaggggtgaagctgcctataaatacctctccaggggctgggaggtaccctctgttccatccaccacactgctcattgccatctgatggtacaaatgagtggctctgccatccagggcagcaggtgacccagacagtggggaagtcgggaggcgatggggcagggatgagaagcctgaccgtgaacaggagagaatgaagccaaggtcagggaagtcttcgggaataaggaaagtcttcctttgggtaacctttgaggtgtttcggtgttctgtccaatcctggttgggtgaagtcctgacttgaggagtaggaggtgctgagtcctcccagagctgagatcttagaatccaaatgcctagtacagggaagccgtagaggtaccatctgcagcttattttaaaagccatcagtgggaatgatccccagaacagtccttacaaagtcgtgccttccccagcgcatcctagcctgtactctagccaagagctcagcgtggctagctaagctatccttccctcacgccttttcttctcctagttgtccaatagccaataggactcctgcatgccagggggacagcagtatcctcacacctgttaatgagttcaagtgtggtgttcgctctcgctagctgagactataccttgccagggagtctggagtgtgcctcttgaacctgtatatgtggtcccaggctttgggaaatcagggcattaaagaaaacaagagaggaggaggagggaaaaagaaggagggagaaggaggaggagggaggggggaggaggaagaaaagataaaaaagctctgttcagagccccaggtagcctcagaggcctagggtccttaagtttctttagagggaacgcaacctgccttggcaccagatacctccaacttagcccccggtttcagagcccacatagctctgagctcagggcttcactggaccactgatgaccgttcttgtttaaatgcagctcctccaccccagcccactgttcgctcttgtagtagttattgattgactctggtagcaagcagttcttaaataaagatgtgttctgaacccgcctgggcggctggaagcactgcacttctcacctcattaaagcctgcctgcctcctgggcctgttgttcagccagtacacccacccctcccacggccaaccttgaggaagctgtgcacacagcccatacagcttcctccaactagagggaaaagccaggctgggagacctgcaggcagatggaggctgagcgctgctgacatcctgagcaggtttcacctaatggtggtcagcatgctggagtggggtgagttgaggcgtggagccacttccagttcctctgatttcaatacacttgaagtgttgactccctggtccctaaggagtttcccctcctcccccatgaagagattaatgtccccaactggtaaggaggtgactatcacctctgttgttcaatcagggtgacacaaagtggtggaactcctagtcaatttccagccttgacactctccactgggtccatctgactgctattccaggtaagcacacatagggatacatgcaagcagccccagtttggtttttcagtgtcaagtaggtaggacccacgttgtgtctcaggtttgtgtgtgtgtgtgtgtgtgtgtgtgtgtttgtctttggttttgttttgttttgggaggaaaggaaggtaaatggaggcctctctattcaatgcttagttttctgaccagagcccttccagaccttccagcatggcaggtagactttagtctttagtcagcttttaccttcccagggcagttatatacacaagactcagggaactgaattgaggggggcttgctgctgtaaccgcagccacgcagatgctaagcaggatcttgccaagtggtcctggctggccatgagctcactatgtagactagactgcctcagtctccgaatagctgtgattacaggaatatgccacctcgaccagacagaactatgctgttgtctttacaaaatccatctgacggtctttgtcctcctctttgctcaattgcttttgactcaggatttgaagcaattgagcggagtcaaaattcagaagcccaaggcacagagaggcagctatgaacaagatcgatccaccttcgacttgactattggtctgcaagagaatgctggcaaagtgttaaatggttgtcctgggtggtttccatctacagaatgtgagacaggagcctacagcagtatgttaccaagctccttccatacagacagaattcatcacagatccctttacaatgagctaaccctgaacgtttcgggagactgcctaggaccgaatcacataataggccccaaaccccagcacttcggtttacaaaacagcttacctcagg

SEQ ID NO: 1769 - DNA, 8455 bp, Mus musculus
agagatgctgcagtggctcggggcgcgcacacacatacgcaccctcgcccgctgccgccacgccaggacagccagtggctaaggccggcggggccaagcagccccgaggctggcggcagggtctgctcaccaggcaaccgcagcactgccccagccaacacccttcccgcactctaggtgtgtctcagtctccagttgactctcctggagctgggctgcagctcctctcttctggactctgcctttgcctgaaacacccaccatgggagcaccggccaggaaaagggcaagcttgctgctgctgctgctggccacaatggctctggtctcctctccaggatggagtttttcccagggaaccccagctacctttggacccgtctttgaagagcaacctgttggcctgctattcccagaggagtctgcagaggatcaggtgacactggcgtgccgtgcccgagctagccctccagccacctataggtggaagatgaacggcacagagatgaacctggaacctggttcccgtcaccagctgatggggggcaacctggtcatcatgagtcccaccaaagcacaggatgctggtgtctaccagtgcctagcctctaacccagtaggcactgtcgtcagcaaggaagctgtcctccgcttcggctttctacaggaattctccaaggaggagagagaccccgtgaaaacccacgagggctggggggtgatgctgccctgtaacccacctgcccactacccaggtttgtcctaccgctggctcctcaacgagttccccaacttcatcccaacggatgggcgtcacttcgtgtcccagaccacagggaacctgtacatcgcccgcaccaatgcctcggacctgggcaactactcttgcctggctaccagccacctggacttctccaccaagagcgtcttcagcaaattcgcgcagctcaacctggctgctgaagatcctcgactctttgctcccagtatcaaagcccggttccccccagagacgtacgcactggttgggcagcaggtcaccctggagtgctttgcctttgggaaccctgttcccaggatcaagtggcgcaaagtggatggttccttgtcccctcagtggggcacagcagagcccaccctgcagatccccagtgttagctttgaagatgagggtacctatgaatgtgaggcagagaactccaagggccgtgacaccgtccagggacgcatcattgtgcaagctcagcctgagtggctaaaggtgatctcagacacagaagccgacattggttccaacttacgttggggctgtgctgcggcaggcaagcctcggcccatggtgcgctggctgagaaacggggaacctctggcctcccagaaccgggtggaggtcttggctggggacctgcgattctctaagctgaacctggaggactccggcatgtaccagtgtgtggcagaaaacaagcatggcaccatctatgccagtgctgagctggctgtacaagctctggccccagacttcaggcagaaccctgtgaggcggctgatccctgcagcccgagggggagagatcagtatcccgtgccagccccgtgcggctccaaaagctacaatactgtggagcaagggtactgagattctggggaacagtaccagagtgactgtcactttggacggcaccttgattatcagaaacatcagtcgatcggatgaaggcaaatatacctgctttgctgagaacttcatgggcaaagccaacagtaccgggatcctgtctgtgcgagatgcaacgaagatcacgctagctccttcgagtgctgacatcaatgtgggtgataacctgaccctacagtgccacgcctcgcatgaccccactatggacctcacgttcacctggaccctggatgacttccctgttgactttgataagcctggaggtcactaccggagagccagtgtgaaggagaccattggggacctgactatcctgaatgcccagctacgccacggagggacatacacatgcatggcccagacagtggtggatggtgcatccaaggaggccacagtcctggtccgaggtcccccaggtcctcctgggggtgtggtggtgagagacattggagacactactgttcagcttagctggagtcgtggctttgacaatcacagccccattgccaagtacaccctgcaagcgcggactccaccctcagggaaatggaagcaggttcggaccaatcctgtgaatatcgagggcaacgcggaaactgcccaggtgctggggctcatgccttggatggactatgagtttcgggtttcagctagcaacatcttgggcactggggagcccagcggcccctccagcagaatccgcactaaggaagcagtcccctctgtggcaccatctggactcagtggagggggaggagcccctggagagcttaccatcaactggactcccatgtcacgagagtaccagaatggagacggcttcggctacctgctgtccttccgcaggcaaggcagctccagttggcagacggcccgggtgcccggcgctgatacccagtacttcgtctacagcaacgatagcatccatccctacacaccctttgaggtcaagatccgaagctacaatcgccggggggatgggcccgagagcctcactgccatcgtgtactcagcagaggaagagcccaaggtggcccctgccaaggtctgggccaagggttcctcatcctcagagatgaacgtaagctgggagcctgtgctacaagacatgaacggcatcctcctgggatatgagattcgctactggaaagccggggacaaagaagctgccgctgaccgagtgaggacggcagggctagactccagtgcccgagtcaccggcctgtaccccaacaccaagtaccatgtaactgtgagggcctacaacagggctggcaccggaccagctagcccttcagctgatgccatgaccatgaagcccccaccacggcgacctcctggcaacatctcctggactttctcaagttccagcctcagccttaagtgggaccctgtggttcctctccgaaatgaatctacagtcactggctacaagatgttgtatcagaatgacctgcagccaactcctatgctccacctcaccagcaagaactggatagaaataccagtacctgaagacattggtcacgctctggtgcagattcgaaccacggggcctggaggggatgggataccagccgaagtccacattgtgagaaatggaggcaccagcatgatggtggagagctcagccgtccgccctgcccatcctggcccggtgttctcctgcatggttatactgatgctcgccggctgccagaggctctgatctcaacgctgcccgccacgcccaagctggacacccaccctaacagacacagcggctggccacagcccccctccaacgccaaggtggtccaacactgcctgagagtggctggcttagacaccttctcccaacagtaccctttacgtaggaggtaggatatttctattctgccacaggatagaaccaggcaaggaatttttctttaaatcaagaggcactgggcagtgacttccatgataatactagacctaatgcctggaccctctggggtcctggacagaaggaacaagcctttggatagaaggtatttgacatacatcttcagatcaagtggatggccctctggggccacaagtgggcactgccatctctcatctctctgggatgagagtcccaggcccagcaggaacatgggcagcagtgggctatcaatttccctctatgaagcagagggacctttcctagtccttgctggagaagcaccagttagtccccacgtgggcttcgtggctccccggcagtcctgcttactcagtagccaagaacaaggccctgggttactggggataagagctctaaagggttgagaggctacaccacctgatggaaaggggcaccagactgaagcccattcaccaccccggtggcactgccctctcagccagcactgccatccctgccatcctccagatggaatggtggagtgacagggccacttgaggtggctatgtgactaaagggcttgtctcgagttgccttgcctcatcgggatgctcccttcatggaccctccagggtaggggcaggcgacgcccatctgaatgccgtgctcttcccttcagctctgctgcagacttgtgcctgcctcctcctcccataactgcaggccctggaaaccagctctcaacacagcatccattctttgtcctgggatggagaggcatctgagaagggtcagcatcaatgtggccctgcctgcttccaggaataccctccatcacctggccacacctgctccccaaactgcctggactctcttgggtccccggaagtaaagagttaatgaggtggtggaggtggaggcagcctgccttgagctctgggtacattaccagtgacagcccagactacagaagctgaagaagccttatagcttgacttatccataccttgcccttaacagatgaggaaacgatgccgggcagtgctggcgcacgcctttaatcccagcacttgggagacagaggcaggcggatttctgagttcgaggccagcctggtctacaaagtgagttccaggacagccagggctatacagagaaaccctgtcttgaaaatggaggtccagaaagggttaaggacttcttagggtcacatgatctgtaagtgacaaggcttggtcaagaaccagagtctcctccccacctgtgggaggctctgtggaggagagaggtgtggtgctgggcagtcgccgcccggtctctaggatgagccctctgcttcaagaggttcagggtgctgagaagatcaacatggatgctctcagtccaaggcacaggcagatgctaggagtcagcggcctgaggctggcttctgccgggaactcagcagggagagctggctggaagcctctcaggctctctcttttcatttcaagaaaagaagtcaaagtgaggacagagttccctagaccaggactctgtgcagcccgaccagaagtcgccagtgtccatgccctgagcccgtgagagcagcagagcaggcgtttcaagaggcgcttgccctgctgttccttgggccatttctgtagtttacagttagagctctattttgttatgggtttttaaaactttaagccctgctcttttttcctgggcgggtttatgttagtatttacccactacaattttttaaagatgtccacacactcacgtacctttccccctaccacctccataccttcccctagctaaggactgcttccttggagctgattaaaccctccctcttctgctcccagcacctcacatacaagggtgctaggggctcagccatgtgatcattctccctcccgtgaaccccagagatggtccagcatccctccctccccatcctatgctggctgggatttggctcgggcctagccctggaaaaccctagctagccctggaaaggggcacctgaaaccttccaaggtttacctatttctcactgccttggatttgtggggtggggggagtgctaaagaaatgggtatctagtgtctgggcagggtaagtgaacctggtcagggaggtgggaggctacagcccctaagcttttcttctaacaaggtccatgaaaagcaggcaagctgctgggagactggagaagaggaaaaccttagccctgtgcaggtagcatttgttgtggggaggtgaggctgtgccagcagctttggagcttcgagtgttatctaaggtgtaaggagaccgcaggtgactcgccaacgtgagcttgtaaatagaaaaaaaaaaagcctcttgctgaggaaacttggaccttaactggcttgggaaggagggctagatcaaatggcttctcagagtccctctcctgccaagggtcctcttgacttctgtacaggctggggaagcttttggactggcccctgctatggtcctgactgctaggggtgaagctgcctataaatacctctccaggggctgggaggtaccctctgttccatccaccacactgctcattgccatctgatggtacaaatgagtggctctgccatccagggcagcaggtgacccagacagtggggaagtcgggaggcgatggggcagggatgagaagcctgaccgtgaacaggagagaatgaagccaaggtcagggaagtcttcgggaataaggaaagtcttcctttgggtaacctttgaggtgtttcggtgttctgtccaatcctggttgggtgaagtcctgacttgaggagtaggaggtgctgagtcctcccagagctgagatcttagaatccaaatgcctagtacagggaagccgtagaggtaccatctgcagcttattttaaaagccatcagtgggaatgatccccagaacagtccttacaaagtcgtgccttccccagcgcatcctagcctgtactctagccaagagctcagcgtggctagctaagctatccttccctcacgccttttcttctcctagttgtccaatagccaataggactcctgcatgccagggggacagcagtatcctcacacctgttaatgagttcaagtgtggtgttcgctctcgctagctgagactataccttgccagggagtctggagtgtgcctcttgaacctgtatatgtggtcccaggctttgggaaatcagggcattaaagaaaacaagagaggaggaggagggaaaaagaaggagggagaaggaggaggagggaggggggaggaggaagaaaagataaaaaagctctgttcagagccccaggtagcctcagaggcctagggtccttaagtttctttagagggaacgcaacctgccttggcaccagatacctccaacttagcccccggtttcagagcccacatagctctgagctcagggcttcactggaccactgatgaccgttcttgtttaaatgcagctcctccaccccagcccactgttcgctcttgtagtagttattgattgactctggtagcaagcagttcttaaataaagatgtgttctgaacccgcctgggcggctggaagcactgcacttctcacctcattaaagcctgcctgcctcctgggcctgttgttcagccagtacacccacccctcccacggccaaccttgaggaagctgtgcacacagcccatacagcttcctccaactagagggaaaagccaggctgggagacctgcaggcagatggaggctgagcgctgctgacatcctgagcaggtttcacctaatggtggtcagcatgctggagtggggtgagttgaggcgtggagccacttccagttcctctgatttcaatacacttgaagtgttgactccctggtccctaaggagtttcccctcctcccccatgaagagattaatgtccccaactggtaaggaggtgactatcacctctgttgttcaatcagggtgacacaaagtggtggaactcctagtcaatttccagccttgacactctccactgggtccatctgactgctattccaggtaagcacacatagggatacatgcaagcagccccagtttggtttttcagtgtcaagtaggtaggacccacgttgtgtctcaggtttgtgtgtgtgtgtgtgtgtgtgtgtgtgtttgtctttggttttgttttgttttgggaggaaaggaaggtaaatggaggcctctctattcaatgcttagttttctgaccagagcccttccagaccttccagcatggcaggtagactttagtctttagtcagcttttaccttcccagggcagttatatacacaagactcagggaactgaattgaggggggcttgctgctgtaaccgcagccacgcagatgctaagcaggatcttgccaagtggtcctggctggccatgagctcactatgtagactagactgcctcagtctccgaatagctgtgattacaggaatatgccacctcgaccagacagaactatgctgttgtctttacaaaatccatctgacggtctttgtcctcctctttgctcaattgcttttgactcaggatttgaagcaattgagcggagtcaaaattcagaagcccaaggcacagagaggcagctatgaacaagatcgatccaccttcgacttgactattggtctgcaagagaatgctggcaaagtgttaaatggttgtcctgggtggtttccatctacagaatgtgagacaggagcctacagcagtatgttaccaagctccttccatacagacagaattcatcacagatccctttacaatgagctaaccctgaacgtttcgggagactgcctaggaccgaatcacataataggccccaaaccccagcacttcggtttacaaaacagcttacctcagg

SEQ ID NO: 1770 - protein, 1024 aa, Mus musculus
MGAPARKRASLLLLLLATMALVSSPGWSFSQGTPATFGPVFEEQPVGLLFPEESAEDQVTLACRARDPAYWKMNGTEMNLEPGSRHQLMGGNLVIMSPTKAQDAGVYQCLNPVGTVVSKEAVLRFGFLQEFSKEERDPVKTHEGWGVMLPCNPPAHYPGLSYRWLLNEFPNFIPTDGRHFVSQTTGNLYIARTNASDLGNYSCLATSHLDFSTKSVFSKFAQLNLAAEDPRLFAPSIKARFPPETYALVGQQVTLECFAFGNPVPRIKWRKVDGSLSPQWGTAEPTLQIPSVSFEDEGTYECEAENSKGRDTVQGRIIVQAQPEWLKVISDTEADIGSNLRWGCAAAGKPRPMVRWLRNGEPLASQNRVEVLAGDLRFSKLNLEDSGMYQCVAENKHGTIYASAELAVQAPDFRQNPVRRLIPARGEISIPCQPRAAPKATILWSKGTEILGNSTRVTVTLDGTLIIRNISRSDEGKYTCFAENFMGKANSTGILSVRDATKITLAPSSADINVGDNLTLQCHASHDPTMDLTFTWTLDDFPVDFDKPGGHYRRASVKETIGDLTILNAQLRHGGTYTCMAQTVVDGASKEATVLVRGPPGPPGGVVVRDIGDTTVQLSWSRGFDNHSPIAKYTLQARTPPSGKWKQVRTNPVNIEGNAETAQVLGLMPWMDYEFRVSNILGTGEPSGPSSRIRTKEAVPSVAPSGLSGGGGAPGELTINWTPMSREYQNGDGFGYLLSFRRQGSSSWQTARVPGADTQYFVYSNDSIHPYTPFEVKIRSYNRRGDGPESLTAIVYSAEEEPKVAPAKVWAKGSSSSEMNVSWEPVLQDMNGILLGYEIRYWKAGDKEAAADRVRTAGLDSSARVTGPNTKYHVTVRAYNRAGTGPDSADAMTMKPPPRRPPGNISWTFSSSSLSLKWDPVVPLRNESTVTGYKMLYQNDLQPTPMLHLTSKNWIEIPVPEDIGHALVQIRTTGPGGDGIPAEVHIVRNGGTSMMVESSAVRPAHPGPVFSCMVILMLAGCQRL

SEQ ID NO: 1771 - DNA, 33294 bp, Homo sapiens
ccgccgccgcacccggacagcgagcggctgaggccgccagggcccaaaggacagcggcccagacaggggctggcggcccggccggccccggctcaccgactcgggcagcatccacctgccccagccaacacccttctctcgccccaggtaggtgccaaccgcttttgtctcctccaacccagggacttccctgcgtgctgttatgggccggggctcccggctcagttcctgtaaatatcccccttgtaacttgggagggaacagggacaggaacactggcaggctggggccgttctgacttctcccctcagccccagggtgggtgctggggctcccctccgccctgtctacgtgggcggcatcccgcagggctctctcaggccgagcctggccgaaaagctggaccccaggagtgtgtccaggaattccagttggccagcgggcagtggcagctgcctgtggagagggcagtttctcctgggccggccctgggcacccggtccaggacaggaccagtccatacagccaggccctgggccctggcctgccccagaagtccctgcatggaattgagccggagtccccagttttgaggtcacccagggtctacctctgcagggtgacctctttgcaaagtcttgcttcagctggatggagaggggggctgtggaagagagaggggagagtggagcacaagtttgggcaagggcctgtccaggaactgggactcggggaggagagtcctgaggccagtcacatcccaaagggcgagaggctggggctaccgggctgaaattcctttccttcccttccccctcccaaccttagcttctcctcaaatccctcccccccatcctcactggtgggagggaagaatttgcacaaagtttggctttccagtaaggaaaggggctggggccagaatggtatggggaagggaaggggcagagctggggagttctggaaagagagggcaatccttctgcccagcaccgtggggcttacataatgggctggaggtggggggcagccccagccagtgagtgtccagagctgaatcctgtcaccttctccaagagggtctctcaggtctgggaagcagcggggcatggagaaggcagtgcctatggaaggggagaatcctgctgctacttggggatggagacgggcaccctctagccccagacccctgggggttgagcctgtgtcctgggggggggggtccagtgaggccaggagggagtggggttgtgcatgccatggccccagccctggagaaaggtgggtttcagcatcttttccctctgctcagaaggagctgggaggaggaacagcccaagaaacccagtgcacaggtgatgttctggtctcgtctgggcaacagtttcggcctcctctcccaaccgtctggccaaagacgcctcagctcacttagcctccgagtctctctacctcctggtcccactcagaggggccggatgagccactggagatcgagtgcagcaaaaggtgggccacctgtgggagaggctgctgtgatcgcacctggacagggagatggcctggaggtcacaacaggtgccctcactcctggccttgggagaagggagctctccccttaaagacagcagcatccaagcccctccccagggtgcccaccagttaacccctttctagccaagctgcagaaccatggacagggcttttgccacaaggtcagagtccttcctaatctcccgtggaagtcctcagcgaataagagggaggcaggaggtgagacagacaggaaagggcccctgacctgatgatgtcaaagtcacccaaggtccacctgcctcacaggtgcagagaccactgtgctcacaccatgagcggtgagggaagcagaggcacactccttatgcagatgagtgcctcagactccaggagtctgctctcattcccggctctttctctcttactctcctcccttcctctactccttctttcctcgcactcccttctctcatcgcgtgtactccaccggcttcagccctcagcctcccgccgccaccatttcccctgccagatttcactccttatgcaactccattccagcaccttctctgccagcagttgttcaaatagagacacatgtgggatgggcctccgaggaattgtgcttaacggggtgattgcacatctcgtctctggctgaccaaacttactccttaggagcatgtacatagacaggtgtaccccaaggcatcctttctgcctctaaagtcaccagggaagcaacgcatttggggtggtttggaggatgcatggtgccctcttcagaaacctccttgagccaaacgttggtgagaaagcgtatttcaaagacaatctctaagcctgagtgtgggtggtatttgtatttttggagggattcctagggcagaaccagggggttggagaagaggtgattgatatgcaggggaggaagaaccagagcaaagaatatgccagggaagccagagggacttaagttagactgcaggagacacttcctggctagaagagtgagccacgaggaggtggggcagtctcctttcagatgactctaaggatggtgtggagaactggggtctggtccaaggttagagagtcctgcctagaggcaaaggttgggctggctgaccctgtaaatttcttccaacttctagtaatcctctttcaaatggtaaaaggtggatgtgactcaggaatccataagaaggcagacatccttttcatcccctcatgcatgctggccaccccctcatccttcaggactacaaccccaatctaaacaaaccacccagaggctgttgctaacctggaacatttatgggagtttctgtgggctccgtatcctgacggtaaccatcctagagtaagtcctctcttagtttgatgattccttgctacaagattagcccatgtttctttgtttaccaaagagaatgcaaacaaaagcaaggagtgtgatattctcatccaaaacctgaacacctcccatcccaggacacactcaggcccaaacgcatctcagtgtcctttttacctaatgagacattcagttcactacgtaggtggggaagtcaaccccagcccctcacacacacccatctagtcaaacctgctgggcttcctccagcctaagcccacatcttctcagtgcctgccaccctgaacaccctgaccaaggggttctcccaccctgtgcctggctggagggcagccttcctgcagtgctgcccaagaggtgaagttaatctggaccccaaatccaaaggaaactagcttgagaggaggagtaggttggacctcacccccaccaggcttaagctctgagccaccctggaggaagctgtctaggaactggggggagcctccttgcagcagagttgggggacatgcagaaattgctctgctaatgcacgaggaaattttcttcctgatttgctttttcagaaacaagttgaaaccattgttcttacgcctggcatctcaaaaagggatccttctaaagccctcactcactgcctcacaccacacacagagcagggcaggcaagtaggaaaacctaaggtctgggggtggctggcttctgatcctgagcttcccaggaggatggaagcctctcttcttctgtccactccctactttaaagggtctctctgttagagtaggtctctcttgcaggggcaaagactctaggctcagatcaagggccagactcccccctgcccaatgctagaagatcaaacaaatccatgagcctgggagccacagctctccccagagggcacgtcagcaccagggctgggcctcggggaagcagctgcaatcacaaagagcctgcagagagagctgagcagctcacagaggggactaaggaaggacggggctgcacgacacccctggtccccattggggctgaggaggtccctatgtccccatttctgccctaaggatgtctccagctcagggtaccacagagacccctcagtcacaatccttcaccccacccctgccagctgcagcctggcctggcccgctgagatcctagcagccctcacccacgccaccacagagccctgtactgaccagaggggcatggggatggttcagaccttcctggaggatgatggtgctgtcccaggaggcaattcttgtcttaggcaaaggaaaaggtactgatcttagatcccatcaggcaggaggtgagggctgttgagaaggagtacctgcttgggagtgcctgtcctggccgcgtgaccccctgagcacattgtaccaggtataactctggcatgggggctgtgtccttgtgccctagtctggggtgctgtgctagtgcttacctatgaccattgcacctttgaggcgtaagaggagggaggcacctgcccaggagattgtgggtttgtcagtctcctaaatacatatgagtgccgcctggacgttgtgactgtatagaagtaagccagacaggcacagtggctgcggacacacggctgtgagatttctcagttctaagatctgatctttcctgagcactcactatgagcctgtgatggtgctgacctcacagcagccccatggggcgggtcctgcccttctcatcccattcttgcagatgggagagtgaggctgggagaggttaagtaacgactgtgataaccaggttatactagttagttttattagggttatactagctagacagcagcaggcaggttgactcaatggcctgccctgttaaccagtgtgctgttttataggatagaggtcaagcgggggcctgaagggctcctcaagtactttgtaggctgataataaatcacttagtctctgcccacagctgggctctgaactcccctttgctaccaccatccatcggaagttgccaaatctctcattgctctccaatctccattactggggagaaggggagacagattcagggccaggagctgggcatcccagtagggagaactctggggtggagggtgtaccttttattttttgactggctccatgcggggggccttatcccagaaaaccttgtcgtgtgttggagccccactcatagccttctgtcccccagctgtcccccaggccctttgtttcctgggactgacaattcagccaactccccctggtgcccccgaaccccccagtggtccactcccccatgtgctggtgccttgcaggaccagcccctgctgatgacagcctgtgcttgcctgtgccagtctgtgcctgcacccctgcaccagggcagctggcctgggcgaggcttggctggctcagggttcgcagggccagctctgggcctggcatagctccactccagccttgctcctgacaaaaaggcctcctccatcctgggcattctagaacgcataatagggcagatggtatggggagatgactgatcggtgaactcatgagcgcattctaggctgcactcgggcggtcggggagctctgtagaggcagtaattttattactgtctcccctgtgcttagcacaatgcctggcacatggtcaataaacactgtgatggaaatggatgcagggcaagactggacgccaactgcctcacctttagggaggcaaggagctccagcctttagcccagactctgcgtgtgtgtgtgtgtgtgtgtgtgtgtgtgtgtgtgtgtgtgtgtgtgtgttcacccaaggctgtggcacacaatggagctcaatatacatctgatcaggctgatgggtctgtggtgctcccccagggcaaccccaggtgctcctggatcccagcccctcccctgcagtctcctctaaggctgtatgtctcgatccctggagggtacccaggatccctgggccggattattcgtgattacccatggtaattacttatggtaatagagataacagataattctgactactggaggtggaggcgaaggatctatgatgcaaacctcctggtgggtttcagggaaacaaggcaaggggctgagtcctcacacccgacacacacacacacacacacacacacacacacacacacacacacagacatacacacaaagaccggacatcatcatacacagacacatagacacatacatacatatacacatatatacatatacatatatgtatatcacacatatacacagggacatatagacacaacagatacccacaagcattacatccacgcacactgggacacagacgcgcacacacacccagctgtcaccaacactgctgtgggagctagggactccgggtaggaatctgctcagaggctatcctggagtctccagcccctggttgtctgtctctgccttgctctggcacattcagtacaagtgcctggagcccaggctcctccccaggccagcaccctgcccccagtgagctcccgggcctgacaggctggcaaagagcaaggagcaaatgatgattgagcaccttctctgtgccaggcatcaggacgcagcacaccagtgccaacggggtgattttccaactttttggagccatggagccctttgtttaaagggaacttcataggaaagtcctgcatataaagcagatacaagtggagctgctctggctggagtggagaaggagtctggagccccatgctctctccctagcctcccatggtggccttgagacaggtccaaacagccccaagacttcacagcagcttgaaaaccactgcagggcactctagcacctcatggaaccctccaaagaactctgtaaagtgcatgttacaatctccactttgcacatgagaaaactgaggcttcacaaggggcattaacctatcccagctcacgaagctgttcagagatgaagtcaatattaacaactcctgtttatcaggttcaaaccctggaaggtcccgacacctctctattctgaggataactccctgcattcgtatagcatccagggacatatgtctgtgatttcccctgaccagatacgctgctgaccctagagctctgagtgtgtgtgtgtgtgtgtgtgtgtgtgtgtgtgtgtgtgacagagagagagagagtttgtcttggggctgcccccaggaagaacggaagacctgtcaaccctatcaagtatatacagactgtccctgacttacagtggcttgacttaaaatttttcaaatttacgatggtgcaaaagcaatacacattcaatggaaaccatacttcgagtatccaacaactactctgtttttcactttcagtacagtattcaatacattacatgagatatttaacacgttattataaaataggctttgtatttggtgactttgcccaactgcaggtgaatgtaagtgttctgagtacatttttttttgaaatggaattttgctcttgttgcccaggctgcagtgcaatggcatgatgttggctcactgcaacttccatctcccaagttcaagtgattctcatgcctcagcctcccgagtagctgggattacaggcacctgccaccatgcccagcaaatttttgtatttttagtagagatggggtttcaccatgttggccaggctgatctcgaactcctgacctcaggtgatccacccgcctcggcctcccaaactgcggggattacaggcgtgagccacggtgcccggccttctgagtacgttgaaggtgggctaggctaagctatgatgttcagtagaataggtgtattaaatggagtttcaacttatgatatttccaactttcagtgggtttatcgggatgtaaccccatcgtaagtcaaggagcatctgcatgagccccatcatgtgtgcccacgcatgtgttcactggctcctggaggcatataatcacagttgttcttgaccagttaaatgcaacatacaaggaacaactatgatgtgccaggtactttgctaggcataggtaataccaagatgaacacaacacaatctctcccctgggcagctcagaaccttctaatggagatggacacagttctacaggcagggtaccaaagctgtagtcaagaacagagtgaattgaattttttgcgtagacaggggcatcttaggcccttcccggcagggatgagacatggacagggccttgcaggagagactgccttgcctaggaagggcattacaggagagtgaagatggatgtgctgggggaatgtcggaggggttgcaagtgcagaatgtcttgagttcaagtcgaactgagagtggcaaggacagggaggggcaggtattttgggagaagtggcacctgggcaccctgcctgtcaatcggaagtggatatgaggctgcagtcggggtggaggagggagtgccatctgctccaacgccccccacccccagcaaaacacccagcttctcggcttccttggccatatccttcctgacgggccctggggacaactctcccttctctccccccaggctcctttgggtgccaactgtggctgtgaaagaggcaggaaaaggttgtggagtggtcaaatgtggagggttgaaagggtttgggagctctcttcctgagaaaatagagtgtgatgtgagacagggcagatcctgagcttgcactggccttcagcccctgcacaggcctgagaggcaatcttaggtcctctgcagccttctttctccacacgggtccccatccaggggacagcattcccaagcccttggccactctgcattctgggagcatcaccagagccagaacactgagatccagagatgggacgggtcttgcaggcagttggtgaaagggcccccagccaggctctctccccaagccctgaccccctcccactgctcttaagtttccgcaaagagggcaggcagagcagagcagcagaatctgcagccgggctcactggcccctgtggaggctctgagcccagtgacccaggttcactctgataaccaataactggaaagcaggcccctgacattccacactcccctctgaactaggaaagtcctcccagggactgggagtgaacggggaggctggctctgcccccgccctcacctcccaagagaaggccccatctctgagactgatgggacaggcatctgacttgctctcagcagctacagggaacaggttcttctccagagctcaatgattgaaccaagcctcagctcatctctgtgcaagagggaggctcctctgggagatgcattaactctttcgacccagaaagcctgctgggccccttcacccatctggttgggggcattgctaatggggccaaggtcatgactccactggcaagagggtgtggacaaatcagtgagacccctcctcactgctaggaaaacaagactgggagacttaaggcagctcccagaggggcttactagcccccacccagacagctgaggggaaggggcagggggaaagtcagccctgagcccacctgccagaggaagatgttactgacttccaacccatgcacaagtcctgttctcttccggcctcgcctcaagagctgacgggcgagacggcaggtgggttcttacctcccaattaatcactgctttcacttcctaagcggcaccccactggctggaatgggggcaggtgggggtacagggctgagccagactcccaggggaccagtaggaggcactcagccccaggaagagcttcttggtaatagccaagccccttcctctggggccctggggagaattagtgcttgggcaattccggcagctccccaggccgaggtaaaagctttacggacccagatgtgcctggagctgggaggggcgctcctcggctcagagccctcctttctgtctgcctccccaggtcctttctcagcctccagctgggctgtccccaagctgagctgaggctcttctcctccgatccccacctctgcccggacatccaccatggggacagccaccaggaggaagccacacctgctgctggtagctgctgtggcccttgtctcctcttcaggtaagagggctcatctgggctttgaagcctagcaggcatgattatagtgttatatccttgctatgatttgggtgacgattacagaaatcattggctctgcattgtgggagcagctagatttctgaggccatttccttgctaaaatttcccatttgtagatcttaccttcctttgagtttaggaggagagggaatatgtctttgccatattatagatgaaggaagaatgacccagagagggtgagtggcttaccctaggtcacacagcaagatgatggcacgccagatctccacaatatcacccggagttgtagcctcaaaggctgcactgtccaatatggaaggtaatagccacatgggactactacaactcagattcaattccattttaaaaataatttcctcaggtgcactagccacatttcgaacgttcagtagccatattggatagcacacagcatagaacatttccatcattgcaggacattctcccagacagggctctgtagtcccctgacatgagcagacagcggtcaatcccactaaaccctggaagggtttcttaaggcaacgctgcatcccagcaaatggaccaagcatagaacaggatctgggaagagatgcggcagacaagggagctgaggttctcctcccaggggagcttccagcttggaggagaggcagaggaaggctggcaggaggggaaggagagggtgaagagggcaggccgagagccacaggccagctggactctggagagcatgtcaggccagaggagccgggccgctggcctgtcctagggcaagagggaggtccccagccgcctcctgctctaaggggtctgctggacccactgcttggcctctgccctgaccctcagcccagatcaatagatgcttcttttctccttaaacatctctgtgggactctccatggtcctggagttctaagcacctcagactccacctcccctaccccacaccccctgcaaggctacagccggtgcatttcaggtcctttgtctcacgagggagggactccactggcatactttcagacgttctcattctgtcctcactgcttcccagtcctgcagctcagtcagtgaggctgctgggaaacagggctgactcagagtgtggggcgagccatccagccccccaggcctcgctacctgtccaagggtccaccagactgggaagagctacagggatgggaagcctcaactgcacagagcaggagatgggcaccccagacggagcagaggggaggcgcctgggcttctagcatccgctccctcagggacacctcagtgctggatccacaccatctgaggaaaggggtatggacagcatccaagttccttagacccagagacacatgaagccaatgaccaaggggctgggatctggtctgccacctcccagagctccagagagagacaggagtggcaaatcccatcgctggcccccacccctcccaggaagttgcctcagctctgggcctttcttgctgccctgtcctcgggatatagctgtggattcctggcactccagtgcaaggaggggtatcaaggatccctctccaccttctcatctctttaactccgttcctctgcaaggtttctgatgcctgtgtttgggggaaaagttaccaggacagggcatcagaaaagaatcagagaggatgaggaacaagaataaggaagggctggcctcgcctgggagagtgtgttttgttgttgttgttgttgtttgcgggttttgtttttgtttttgagatggagtcttactctgttgcccaggctggagtgcagtggtgtgatcttggctctctgcaacctctgactcctgggttcaagcgattctcctgcctcaacctcccgagtagctgggattacagacactcgccaccacgctcggctaatttttgtatttttggtagagacggggtttcaccatgttggccaggctggtctcgaactctcgagctcaggtgatcctcctgcctccgcctctcaaagtgctgggattacaggcagagagtgtgtttttgcatgtgcatgtgtaagcacacacacggggaggctcatgtgtgggtgggtgtgtatgtagctgaagaggcaagtgtgggtgtgtgagggtgtctgtggatatggatggctgagaggctggaggtatgagtgaggtgcctgcatggaggtggtactacgctggggataatgaatgtgtccagaaagtctcacagcacagtgtgaccagctctcatatcccagcctccctgcagaatgcccaggggcattttctaagacttggtctcctgagcctcactccaagagattctgactccttatctgtgagatggagcagggcctctggtggttctgatgggaaacagaggtcaagagtcaggaacagtggggttaagaatgcttgtggtggggtcagcctggccaaggtccaaccccccagatccgctccttctcgctgtgggatctggggcaagttattgaagctttctaactgtcagtttccatgtcaggaaaataagaaaatggcaatacctatcttgtaaagaggttatgagaaggaaatatggagcatggtatgggataaatagtaagcagtccgtctatagcacctatttttattattatgaatgcatggattatatataaaagtctccatggccatctatagctgtgtgtcaggggggaatggatgtgtgtgtaaatgtatgtatcttgccatttgagcagcttagggaggtgcatatgtacgaatgtgtgtatgacatgagcgtgcatataagaaaatgtgtgtaggtgagagatgcgaaggggtgtgtatgtgaatatttgggtgagtggacagctgagagcagaggagaaaggtttctcgggaagaaagagtctgaatgtatcaacatgccctgagcccactcagccaccccatcacccagcgttcctggaagctgctattgtactaggtggttcccagcagtccggctgcctcccagcgcctcctttgcctcccctcccagcagtgccagctggggcaggattcctaccgtacaccaccatcattaacttgggattaagctggactttccagccgagatgatgccgtcaccgcccgccgcctccgcctctgaggcctggggcggcagtgagggagaatggcacaagggatgcctgcaccgggccattcctgggagccctgcctcctacctcattctgagagctgcttagcagctgccctcactcccagggggccaaggctgggcctcagctgcagcatggggccaccccctacccctggaagaggactgatggctggatgcgctgggaaaggaactaattagttaatggggatccctttccccatgacccaccaaggaaggcctgaaatcagctgcgttaagaggtagaagccaattagggatagcctggctcccacctgacaccgcagaagcaaaacggactggccccaccagtcagcagagagcccaccccagccctgtcgaagggcaggtgtgatgtccggccaatctgtggctcttcatcccctgccctgccctgcagcaggacaatgatgcatgaagagagaggagtctgccccatttgcctgtgtggtgctcattggtccaccaagctcaggaggaattgatctgtctgtgccacagacttgctgggtgaccatgggcaagtcactcccttttctggacatttcttgaattgtgatactggaattgtataaaactgccaccaaagcaaactgcccaccctccacccaccataaggcaatccttctcctccaagtccccaccccacatgtggctccagcagacatctgctgagcacactctccgtgcccgccaccttccaagggtttgtctggctgaatcctcatgcagaccctgggaggtgaactcatattcttttcatttcacaggtgaagatactgaggctcagaagagttctataactttcccaaggtcccacagctagtagagggccagcctagtccccaggcccaggcctcgttggtccacactgccccagtaagggtattaggctccagggacacacatcctctctgcatgtttgtggctggcgacgtctcatgcacctcacaccccacagatcagttcttctgtaagggtcccttgaaagccccctgggaggtagaactgcttccattctgaggccccagcatcttgaactttatggcatttgctaccttgcactgtcaatttcctgtctccctccttggaccgcaagccccttgaagaagagggactgtgtcttaatcatctttacaagccagtctctagcccagtgctgggtatagagcaggtgctcaatacctaagtgtaggatgggtgattgattgaactagtatggccagatggggcctgcccagcctatttaaattcaaatttaaattaattaagtaatataaaatgtaaaatgtcgttcttcagtcgcaatagccacatgtcaagtgctcgatagccctacgtggctagtggttaccacattgaacagtgcagaaaatgggacattcccatcatcagagaaagttttactggacagcacagcccaagaggccaggctccagccaggccaaggctctgaggcatctggtggtgtcatcacctgcagcttggagttcagccctgggatcccaaaccaccttcgggcctgtctttgaagaccagcccctcagtgtgctattcccagaggagtccacggaggagcaggtgttgctggcatgccgcgcccgggccagccctccagccacctatcggtaaggcctctgcagtgggtgctgggaggccctgggcagccgttgaactttccctctcatcagccctgccaccaggcaggactcagaggtccccttcctctgtcccctgctgcaggtggaagatgaatggtaccgagatgaagctggagccaggttcccgtcaccagctggtggggggcaacctggtcatcatgaaccccaccaaggcacaggatgccggggtctaccagtgcctggcctccaacccagtgggcaccgttgtcagcagggaggccatcctccgcttcggctgtgagacccgcgggggaccaagacactttgggggagggggagagggggctaggagaaattactgagaaaggataagggacaccctcaagccgggccttcctgacctcacatgacatgccttagtgaactgctgcttctccgtgaaggatgagtcggggaggggctcgcaggccaggaggacagtgcctgagcccctggtctctgcctccagttctgcaggaattctccaaggaggagcgagacccagtgaaagctcatgaaggctggggggtgatgttgccctgtaacccacctgcccactacccaggtgagtccagacctggggccagggttagagagggcacaggaagggcttccagatgcttggcagaggaaggatggaataaaaggagacccctggaaatgacccttagaagcacccatccctgggaccctaactttaaatgatctgtgtttcctttataggtctgtcactttccatcgttgtgccctgcttccgccttcaaactgggtggcccctgagggctgcgatccctggcagacttagcgctccctgagggcaggaataaagtcacttcttccctctaggtctccccttagccccagttcagagcatggtggctgtcaggacagggcttgcagaaccgcaccagcatgctggggtcccacccagagtggccctgttagcccagcaccccctggtttcctcaaactcctcacatcctaggcttgtcctaccgctggctcctcaacgagttccccaacttcatcccgacggacgggcgtcacttcgtgtcccagaccacagggaacctgtacattgcccgaaccaatgcctcagacctgggcaactactcctgtttggccaccagccacatggacttctccaccaagagcgtcttcagcaagtttgctcagctcaacctggctgctgaaggtcaggcttggccaggcgtggctggagggagggaactggaagggtcagcgggcattaggaaaagggtttttcctttggagattggaagatcagcttgcagggcactgattccaggccctggacccccagatcctcctgcttcaaatcctgaggcccttgccccaggcctcaaggagattccacacagctgcctagacagagttggctctgaaaggtgctgagatcccatgcacgggagcacctgacctggagtcatctgcatctgatttgtaaaaccctctctccccagatacccggctctttgcacccagcatcaaggcccggttcccagcagagacctatgcactggtggggcagcaggtcaccctggagtgcttcgcctttgggaagtgagtgtgaagagggaggggaagcagagcacggtctctcgggggcacaggtgaccccagggtgagggcaggcagagtcagggctcttatcttggtgtccctcacagggtctagcaaagtactgggcacacagtgggtatcgaccaccactcactggacagtacctctctgggtgaggcatcgcatatgccaggggccttccatggccaggatcacttggtcttccagcagtgcatggcaggctcagacagcttgagtaacacccagggctggaggcaggcagcacagtgtacagactccaaccctgtctgtctcattcagatcccagctctgccacccgcagaccttgggtaaactgcctaacctctctgtgcctcagtttctttatggtggtgataatagtacctacctcatagggttgtcatgaggattaaatcagttcatatatgtgagatacttagaacagtgcctggaatttagttaagtgttccgtgaatgttaacagtgatctatttgagaatggcagcagaaagtgttctctttctcgtactcctagaagaaggagtcactagaacagggctaagcaaatagcaggtgctcaataaatgtttgtagtatgaaagaaagaatgtgatttgtactttggccccctcctccctcaactatctcctatggttacctgggagaatctctgccttgtgggaagttttgggcttccagaaaatccacatgaaaagcatgtggaagtggggccaggtgcggtggttcatgtctgtaatcccagcactttgggaggccgaggtgggaagatcatgaggtcaggagatcgagaccatcctggctagcacggtgaaatccagtctctactaaaaatacaaaaaaaactagccaggtgtggtggcgggtgcctgtagtcccagctgctcgggaggctgaggcaggagaatggtgtgaacccgggaggcagagcttgcagtgagccaagattgccccactgcactccagcctaggtgacagagcgagactccgtctcaaaaaaaaaaaaaaaaaaagaaaaaaaagaaaagcatgtggaaggggaatatattaacccattaaaactgatacctcagtccgttttagtgcacagattactactaactaaagtccctttcaaagtaggggcaaggcctgccctgtagaggcaacggaaaagagaacccgtaaagacccaggtcacaggccactgtggcggagggcagacccagaggcatggtgaccggtgcgggagagggcaggccagcttcagggtgcagaccccgcagaagcccggcttcactggctccagggttgttgcaggggggatgggtagagcagccctgcctcttgccccttccctgcgtgtgctccgagcctacctgggagaggagagtgaggatcagccagaaggcaccctctctccctctgttcctcccaggcccagcatctcaggagggcctgagagtctgggtatgaggagctgcgggcactggaggggtaggcccagctcagcccacaccctctggctttgtctctcctgccagccctgtcccccggatcaagtggcgcaaagtggacggctccctgtccccgcagtggaccacagctgagcccaccctgcagatccccagcgtcagctttgaggatgagggcacctacgagtgtgaggcggagaactccaagggccgagacaccgtgcagggccgcatcatcgtgcagggtacagagccagggacaccttctccgcccctcccgaccccccttcccgccttcacccttgtccccaaggaaacagacccaaaagtcagggaggagactgggaggccccctgcatgagcctgcttgccctaggactgcactgagtctgggaccagaggaggctagtgctgtggtcacctcagagcttcagtcaggggtgcagaaagcacacaggaggctccagaatgatttaagttgcaaaagcagccactggcacagccacagagtgccagctttcttgtgcctccttcttccggccccctcctctttgtcctctccatctcagaatgctcatggcgccctctgctgtctggcacaggtgctgctgccctgattttctgttccttttaatgagctggaagctcctcctagctcatgccaggttttcttttccgggctcccacagctcagcctgagtggctaaaagtgatctcggacacagaggctgacattggctccaacctgcgttggggctgtgcagccgccggcaagccccggcctacagtgcgctggctgcggaacggggagcctctggcctcccaggtaggagacatggggcttcccccgacacatcacaactgtcctctgctcacttggttccctcccccgcccagaacttcccctgcaccactagtagcccctctgggctaattagggtgtcagagggtggtcctaggaccacctaaggacttcttcccatcccagtcccattgtcacaggctaggcctggatccaggcacagttcagccacaaaagaagtgatgtggtcctgactgggtcacctcacccttccagctttggggaggcctgggtaatctgcatcctgaggttccaggcagccctgaggtaggactggacatatgagccatatcctctagggattatcagcctagagtctccactgctcccacccctgccaacccctcctccctgtggctcctgtggtcctgatccccctgggctctgggctcttctgcacagaaccgggtggaggtgttggctggggacctgcggttctccaagctgagcctggaagactcgggcatgtaccagtgtgtggcagagaataagcacggtaccatctacgccagcgccgagctagccgtgcaaggtaaggggcccagggaggcaggggacatcccaaggacatgcatatggtggctttcagagctctgagtttaggtgtttccaaacacacatgcacataccctgtggccattttccttggttttccaacagtttctaagtaggagaactcagagatttaagaaaggagatgagacacagggttgacagctgccagagggcagggtctctgacttgttccatgtctggcacacagtaaatgtttgctgcagtgagtgaaaaaaacagaaaccaaatcaatcagatttgtgtaacccaaccctttcagctatgtgagctttggcaagttacttagtgtttctgtgtttcagtttcttgattataaaatataggcaataatagtcctgccctcctgggctgctgtatggaacaagtgagatgaaagaggtacagcataaagggcctgcccaccatacagcaggtgcccgggaaatgtaagccagtgctaatatttagttgtgtgacttgagctcactgagcctcagtttcctcatccataaaatggacacagtgatacccaccacatcaggttttagtgaagctttgctaagaagcattcattcgttccttcatccattcaaccactacttactcaacacttcacagggatgaatataaaagatacggtctctgcctttaagtagcttacaatccagtagagggaaagggacaaataaaccccaaatcaaacaattaaataatttcagctagccatcaaatatagtataaagaaaatccaggcagggtgcagtggctcatgcctgtgtaatcccagcactttgggaggcaggggtgagtggatctcctcaagctcaggagtttgagaccagcctgggcaacatggtgaaaccccatgtctatgaaaaacacaaaatttagccaggcatggtagcacacacgtgtagtcccagctacacaggaggctgaggcaggagaatcacttgagccctggaggcagaggctgcagtgaactgagattgtgccattgcactccagcctgggcaacacagcaagacttgtcttttaaaaaaaaaaaaagaagaagaaagaaaagaaaagaaaaagaaagaaagaaagaaagaaagaaaagaaaagaaaacccagtagagtgatgggcgtgagatgggcctgttaggtggggtggtcagagaagtcctctctgaggaagtctcatttagactgtgacctgaatgttaagaagccagccgcgtgaagatctggggaatttccaggcaagatttacagcaagtgcaaagctctggaggcaggaaaagacttcacaacttcaaaagagagagagagagaaaaaaaaaggctaggtgattggaacataatgaatgggggatagagtggagcaagatgcgattggaaaggtggagacttatttgtgaagagccgggcttcactgagtgtgagttgaaaaagctgttcattcccaactgggtggagaaaagattgtagaaggaaggtgcagaaacaggaagactgatgtggggtggcaggggtggtggtgaggggcggagggggggcgcgttgtcaatagtccaggcgggagatttgatagcttaggccagagaaaaaagggcttggttctggatgcattctggaagaggtgctaataggagtcactcatggcgtggcttcaaagggcacgccaagtaacgtcttaatcaagggtgacagtacttttctctgtggctctcccctttccttctagcactcgcccctgacttcaggctgaatcccgtgaggcgtctgatccccgcggcccgcgggggagagatccttatcccctgccagccccgggcagctccaaaggccgtggtgctctggagcaaaggcacggagattttggtcaacagcagcaggtaccacccacaccccaccctgcacagttcctgctcctcctcattctccatggaggccaattcccctcctgtgacaacagtcacaggagttggccagccccagggacaaccatgcctgagttggccacatctgccttgtccttgccacagagtgactgtaactccagatggcaccttgatcataagaaacatcagccggtcagatgaaggcaaatacacctgctttgctgagaacttcatgggcaaagccaacagcactggaatcctatctgtgcgaggtgagggctgccatgtgggtaggccgggggctcagcctcctcagggtactgtcctccccatcatcctgctcctgtgtccacattgctcctagtttggtgtcaaggccaccccaggattcagttttgcttgggaccaccccctggccaccactgagactctggtcatgcctccctgcctgccacacactcatgcagtcctgggcagttgggacctgtgggtcacaccacctcttctctttgctgggccttaggacagagcctctcagcctgccctgcggacccggcctgggcccatttcctcccccatccacccaagggccttgtttttcttggcagatgcaaccaaaatcactctagccccctcaagtgccgacatcaacttgggtgacaacctgaccctacagtgccatgcctcccacgaccccaccatggacctcaccttcacctggaccctggacgacttccccatcgactttgataagcctggagggcactaccggagaactaatgtggtgagacctagggccagagccccatggcttctccctccttctagagagacaggggccccaagatgtccttagccatcctcacctttaagaaacccatagcctaagcgcccccattccctcaggcccacacatggcaagctcatccttggatgaacagctgaccttcctggattccacccagggaccatgcatttaggagagggttagggacaaacctggagttgtgggcagccaccaagacactcccactactgttcttgttagcctgtcccctagggcaaatgatattattaatgtggacagtcattgactgtctcctgaaacaaactttgctgtttagtccccagtggttctaagtgatgagtcgtgattcctcccattgagcagacaggaaaactgagatccagtggggtccatggatgtcatggagtaggggactcccaagcgctgcctcatgtctcatggcctgctgcactggtcagggccggtggtctgacctgctgcccctaactgtccccgtgtgcagaaggagaccattggggatctgaccatcctgaacgcccagctgcgccatggggggaagtacacgtgcatggcccagacggtggtggacagcgcgtccaaggaggccacagtcctggtccgaggtgaggggtttcccacctctacccctaccccaactcccttaaaacccagctgggctgttctgacctgctcgcctcatctcccctcccttccctcaaagctgcggggaagggcttccggcggaactcctgtgagctggatataccctgtggttcttcacaggtcctaaatgatcaggacatttttcttccaaagtcaaagtttaaaaaatccactcctaaacacatcccaagacaggagtgctttactgagccctgaagttttcaaagcctagtgctgggagatctatgcacctctccatgtgacagcctctgtgagctcccccagccttgagacacatccctccacccaacaactggcacccgccccaactgcccacaccccttgcccgccctcccgcctgggtgtgtgttcactgcgtcctctgctgccctgtcttggtactgtaccagctcaagcctggctgggaggaggttggctcaaattggaagctgcccaattctgacccactgtgctctgacctcttggtgcaggtccgccaggtcccccaggaggtgtggtggtgagggacattggcgacaccaccatccagctcagctggagccgtggcttcgacaaccacagccccatcgctaagtacaccctgcaagctcgcactccacctgcagggaagtggaagcaggttcggaccagtaagtgtgagccccacctgggtcagtgctgataaggctcgactgggtgtaggaggtggaaagggtcaaggtttggggatcggggtctgagggccagggctgagcctggagcttcaaagagggacaagatctgtcctctgccagcagagagcatgcaggcaggcaggaagacagtcacacagaaagtaggagagtcgggaaagagttagaagaggaggcgcttggtctatgcccttgaagaattggtaggattgttactggagcaatgaaaatattcatggggacataggggcgtaggcgtgcacacagcattgcagaggcaccaagatagggaaattgagtagtttttcaatcatttctgaaaaaggtactgagtgcttagtatatggcaagtaccgaagtgagggctgggtagataaggggtgattcaggccagtgcctgccctctgcacccagatgaataagcgaatgctggaatatggactccctggtgccttgcagatcctgcaaacatcgagggcaatgccgagactgcacaggtgctgggcctcaccccctggatggactatgagttccgggtcatagccagcaacattctgggcactggggagcctagtgggccctccagcaaaatccggaccagggaagcaggtgagagtcctgtgtgtcccaaaaagctatcatcagggcagagaccctggcaccacttatagggaatgccaagccagccgcaattatgctgagttccaaccctgctcacagggttcagactctcacaaaacagaggaggacagaacaccaagttgggaccagggccactgcatggacaaaccatctagtccaaactcctcatttaaaaactggccaaccttacaactgcatgtgcatctataatttttttaagtttaatttttaaaagtggaaaaaccaaagttcggagaaaggaagagtcacattgacagagcttggacttgaacccaggaccatggggtggtagacagatgtcttcctggaagagtatgcactacagaaatcagttaatgctggctgggcgcagtggctcaagcctgtaatcccagcactttgggaggccgaggcgggcagatcacctgaggtcagaagtttgagaccagcctggccaacatggtgaaaccccgtctctactaaaaatacaaaaattagccaggcgtggtgacacacacctgtaaatcccagctactcgggaggctgaagcaggagaatcgcttgaacccgggaggtggaggttgcagtgagccaagattgtaccactgcactccatcctgggcgacagagcgagactccatctcaaaaaaaaaaaaaaaaaaaaaaaaaagaaagaaaaaaaggaaatcagttgatgtgaaagatgtgtgtgtgttctgtgcagggggctagggaagcagccagtgtctccaagcctttagatggtttctttgggagcagatggaattgaataacctgcccacaaccctcagcaaaaagcgtgtgggtgtcagaacttgagtggagaaggagggggagaaaagaacccaggagagagtaggggaggcacaggctccagtcagcatctgctgagaggctcctgcccatctccgagccattcgcaggggaaggcctggaatgagagcccggggatcctgggaccaggagcatagattaaggaccctgcctcacctcctctacagacctgttgcactggatgtgtagtgagggtccaccttcttgtctgcctgaaacatgttctcctacatgccccagactgactctccaggccctttttctagaatcactcaacatttttagctggtacctctcctgagtaagaaattccagaggcagcactttctttgattgatcctgaacttcttggagggtcaaatgtggagaaatgaggggactcctttattctatttacagcatcccagtagctgaggagcacaaagacagctgtgatgcaaaggaaacatgatgggctttaaaatgagaagggctgagttcagattctacctgtgccatgtattaactgtgtgaccttaggcaagttgattaactgctctgggcctcagtctttccaccctgaaaagggcaataataacacccacctcacaggatcaaatggccaatgtgtttaagtacctcttgcaaattacacggtcctaaactattgtcatcagaagcaagtgaaaaatctccagctgctggattctctacggaaatattttgacccccagccaagttactttctgccaagctgcaggagctgatgaaataaattcctgttttaatatcagccttgtttaatactagagacaattaggagattaaatctgcaacaaaaagaaaaatagataatatatcaccctggagcccaaaagtagtttgttttgtttgtttgtttgtttgtttgtttgtttgcattaactgcagttctgggttatttattccccttattttaaagcgagtgagagttggtctctgtgatttagtttaagttgatggagtaaggaggacaatgatcatgtgtgcatcatctgctctatactaaccaccgtcttgtctaatttcattctcattatggcctctgagagaaacatgattatcttcatggagaagagaatcagaggctcagaaaggttaagtgacttgcccagggaagcacagctagtaaatggcagaggtgggatttgatttcaggactgcctgactccaaagcctatgttcagagggaccactggggggcaaacccagggcccagttgaaggggttcccatcttacggtgctctacaggcacaggctcagggctttcattttttccttgctcattaacaagccatatcggtgtcccttggcccttgacagccccctcggtggcaccctcaggactcagcggaggaggtggagcccccggagagctcatcgtcaactggacggtaagctgcaagggtcagatgtcctcctcctcctccctgacccctctcccgcttgagcagctgcagaaaggaccactgcacagctctgactcaaacgcggataacttcctgtcccccttccacgcacccgctgccccttacgcgaatccacgctgcaggcgtaggcgtccagggccgctactcttggcaaaggttgggtggggccagggaacgggcagggacacatgccgcggaccctcgcccatgccatgctcttgcccctcagcccatgtcacgggagtaccagaacggagacggcttcggctacctgctgtccttccgcaggcagggcagcactcactggcagaccgcccgggtgcctggcgccgatgcccagtactttgtctacagcaacgagagcgtccggccctacacgccctttgaggtcaagatccgcagctacaaccgccgcggggatgggcccgagagcctcactgcactcgtgtactcagctgaggaaggtgggctgcccctgggccccctgctcgtccctaccccagccacttgtccacagggatgtggggtgggggaacgctactcatctcccagctcagttccataggaggaggttgagaggacacctgggttccacatcattggcctcacttccagctcttgctaccttgtctcccttcggggttaggaaaagggaggctctctgggaatagaagtgggccctggagcattgcttggggggctcccactcggccttcatcctgaaggctttcctccaaaatcttaagcaaaggcaatcctggttgggggctgctctgcaggacacaggggggccctgggaatccaaacccattctgtattggtccccagagcccagggtggcccctaccaaggtgtgggccaaaggggtctcatcctcagagatgaacgtgacctgggaacccgtgcagcaggacatgaatggtatcctcctggggtatgaggtgagcaccaacctgggacttgggagaggaaggggtgctggggcttcaaagccaggtgggaacaactcacagaccactaatcattcctcctggcgtccctggttcgctgacatggcaaactgagcatccagtctgtgtagcactgtgaatgcaaatttcactaagaccccatggcaggccaggcgcggtggctcatgcctgtaatcccatcactttgggaggctgaggcggtagatctcctgagatcaggagtttgagaccagcctggccaacatggtgaagccccgcctctactaaaaatacaaaaattagctgggcatggtggcccatgcctgtaatcccagctactcaggaggctgaggcaggagaatcgcttgcgttcaggaggcagaggttgcagtgagctgagattgcgccactgcactccagcctgggtgacaaagcgagactccatctcaaaaaaaaaaaaaaaaaagaccccatggcttatgcccattggggaagacagaccctggaggcagccttaaagtaaatgcttggctagagccagcattggaagctgggagggtagaaggaacaggttctgggaaggggcatggcctgcccctttcatcccagagcccattcaggctggcctgtccagggctgcacagaaaacagcctgagccgctctatggacagttgatcatcctgtcccgggggaatctggggcccagcagtctggcctgagtcctgggcccactgagaactccacaaaggggtacctgtggagcagatggcaagtgatgggaagcaagagggagagaaagaaggaaaagcaagaagaaaccatcaagctgggcctactagtgatagcacaagttcattctagtagagtactctagatttgagtacaatagcttaggcaagccacagtgtggagataattccaaactctgcccttgcctctgcctttgaaagcatatttagcaggtcttcatgctatgattaccatgaaaatgggtttgcatttattaggcaaccttcagaagcttgcttagggccaggggactactttgcaatacaaataagcattttctgtcccttagcagaatgcccacggtagccccccaagttaatgaaatgaaatgggttccagcaggccattgctaggttgagcctgtgccaccagctccctccctgacccatgtcttgagcaccttccttgaactacgcaccaacagacagcagggactcacacccacatggccctgctgtctgggtgctcatgatctagtctccaggttctgaggcctaagactgggtcacagggaccaggatgagcaagagaggaacagaatgtgggggccggggcagccctgagatcctgggcttgactactaccccttgggtacccccgcctccttcagatccgctactggaaagctggggacaaagaagcagctgcggaccgagtgaggacagcagggctggacaccagtgcccgagtcagcggcctgcatcccaacaccaagtaccatgtgaccgtgagggcctacaaccgggctggcactgggcctgccagcccttctgccaacgccacgaccatgaagccccgtgagtctgtctgcctggggtgggggtagggcaatattttggagggtgggtgcctctgagatcattccttccccaatgataagacaaatgctctagcccaccagctctgggctgaacagaaattaggcagcgagcctaatggaaataagggaatggaattcatggcccctgaagcgtctcacacttctccaacctttggattttcatgggctttgttttgtgggcatgggtgacagaatgtgctgggtgtaactgctagaggcaaacatccagagaagggctggttaaaggtgagggggtgcggggtgccagggaaacgtttggacatctctccaattcttcctctctggcagctccgcggcgacctcctggcaacatctcctggactttctcaagctctagtcttagcattaagtgggaccctgtggtccctttccgaaatgagtctgcagtcaccggctataaggtgaggaagcaatcagctaggcccagaatgggaaggaacagctcctctgtgtttccagtgaacataagcagcagcaatttatagcaagaggcatctgagtgagacataagcaaagggtttgtgactgtgagaggaatgaaattcatgaactattctctcagtaacttgcagtagaaactataaaaacgggcagatggtatcactgcagaaaggcagagttcacaggggcagtgatggactatggggatggagtatgggggttcttctagcttaaggagtctacggaaacagttcagtggcctgcaagctttcctccaccaatgaggagctttgtcaatggggaggaggggtgaggaggctggacctcaagagcccagaaccatcgggtctcctcccagtacctaaagctggggatgactcaacgatcagccctggtgtcaggaaactccacctggaaacctccttcccacagatgctgtaccagaatgacttacacctgactcccacgctccacctcaccggcaagaactggatagaaatcccagtgcctgaagacattggccatgccctggtacaaattcggaccacagggcccggaggggatgggatccctgcagaagtccacatcgtgaggaatggaggtgctgctcctcccctacccttatcccctcgagagattcaggatccacccagatacctgagaggatcattcccacccaggccaactccaatctctacccgcaaaggaaagtggaaggcaggcaggaaccaagtgcaaagtagtcttagaactgcctcgccgccacctttctacccagcccccagaacatccccgagggccagggaagggcgcagggtgcagggggaggctgaggaccaaccagcaatagcaaacggcctacaaagcaccgtaggagtcggactgagaagaccacccagccgtccgctcccaggcctgcagctggccctgtgagtctccttaggaaaggtctcaatcttgccacaagggtggggctagggtagtcccaggcccagctgactcagcttgtgctggtttcaggcacaagcatgatggtggagaacatggcagtccgcccagcaccacaccctggcaccgtcatttcccactccgtggcgatgctgatcctcataggctccctggagctctgatcctggaacccctccctctgcgccgcagctggacgccacctccgacggacacagccagccccttcctgctgccaaggtggcctgacactgtgccagagagtggctggttttaaatacctactttaaacagtgccctttttgtaggaggtaggatattttatattctgccgcaggatagaacccacgcaaggattttctttaaattgagaggcaccaggcagtaacttccatgatgacactgacgcctatacctgagctctaggctgcctggagggaaggaacaggcccatgggaagaagggggttttaaaaacatgtcttcaactcagcagagatggccctctgggaccctatacggactccgccacttgagagcagtcctaggcccggcaggaacaccagacatgaacaggttgaagaactggagcgaagtgcacacctcaccatccttcagtctaaggaagaagggcaagccctgggaccaagagctctcccgccttctccctcgagcagcagcaaggaccctgacgctgtccccgataactccctaggggctcctgcctgcccaagcggctgagaaccagcgccccgatgcctgaggctgggagcctgagccccttcagctttgaggggggtgatactccaggctgtttggggtgggagccaaaaagagttgagaggccagggcccttggtggaaaggggcaccagccttggtctgagatagtcacaacccaggtgacgatgccctctcagccaacactgccaacctgaccctgtcatcccgattgacagcgccacttcaggtggctgggtgactaaagggcttgtcttggtggggtctcccacccctccaagacccattctgcacagtccctccagggtttgggcaggagatggccaatcatgcgcccacctctccagtgctgcctgcagtcagctcggcctccccgacctgcagccccagactctgctctcccagcactgactcactcctgcctgggaggggaatgcagcattcatgctgtgtgtcctggtattgggaggtttctgggaagggcagaggataaatgtggccctgcctgctcccaggtatacctaggaccacctggccagatccgctcccagacggccttggactgcttgcatttccccggagaaaaaggggttaataaatgggccatcctttcctgagctctgggtatactaccagtcacagaacgtcagagctggaagaagccttagagctcaacttcttcaagcccctcactttacagatgaggaaatggaggtggtccagagagggtctgggattcccaaggtcacacagcccagaagagatggggctgggttaagaactcgagtcttccacctttctgttcaaggctgtttgtctacccagaggaaggaggcactgctgaatggctatggcctggctaagaaggtggttagtcagtagggtatgaaaattctacttcaaggggttcggattggtgatcatggggattggcatggctgggttccagtccaaggtgtgggcagagcttctaccaaacttcaacatggagggctgacttgaagctccctgtccccctcactcttgccccaagaaaagaggccaaagcaagagcagattccctaggcaagagcagcagcacaactaggaaaccccaaagcccatgctccgacaggtggcccttcacagggggcagcgggacaggcatcttgaagggcatatgtcctcggaagctccgagcctgttttctgtagtttatagttagagctctattttgttatggttttttaaacttttaagtcctgctctattttcctgggcaggtttatgttgatgtttacccactacaattttttaaaaatataagctcacatgccttttccctgccacagccaaacccccactgcaccctacccacccacccctagcccaggtcagctttcctggagctggctaatcaaagcctcctcacctcttcccaacccttacaagcaagggtgctaggggctcagctatacgaccattctccctgacagggagtccaaacttggcctagcatccctcctggcccccctctggccacgacttggcctgtgcctggttctctatcagaaaggggatgctgaacaaaacctccttccaagttttatccaattcgttcctcattgcctcgggctgcatcaggggaagcaggggacaggtgtccagttgctgggccgagggaggagctggtttggcataggacctaaccagtgaagctagaggctacagccactaaacttgcttcaggccaacgatagttactcacaagtaagtaccttaatgctaatgaggtccactaaaaaggggaggaaggcagacctcctgggagacccacgaagggtttttagccagggaaaactgagccccaggaaaacctaaccactgggcaggcagaatttgtttgagggatagaacgacaacaaaataaatgttcctgcagcctgagatttcaggtagagtactgactaaggtttaataagacaataggtgacctgaggacatgcaagcttgtaaaatgcaacagcctcctgctagagtgacttgtacatgagcttgcttgcagaagactagattagatgtttctcaggatcccctcctgcgcaggggttctctgattttcgtgttctctgcccagatgggctgggggagttgagagtgtgcttattttcactgcgatcatgagaccacagttctgggttatctcctctcatacatcaagccccag

SEQ ID NO: 1772 - DNA, 3588 bp, Homo sapiens
ccgccgccgcacccggacagcgagcggctgaggccgccagggcccaaaggacagcggcccagacaggggctggcggcccggccggccccggctcaccgactcgggcagcatccacctgccccagccaacacccttctctcgccccaggtcctttctcagcctccagctgggctgtccccaagctgagctgaggctcttctcctccgatccccacctctgcccggacatccaccatggggacagccaccaggaggaagccacacctgctgctggtagctgctgtggcccttgtctcctcttcagcttggagttcagccctgggatcccaaaccaccttcgggcctgtctttgaagaccagcccctcagtgtgctattcccagaggagtccacggaggagcaggtgttgctggcatgccgcgcccgggccagccctccagccacctatcggtggaagatgaatggtaccgagatgaagctggagccaggttcccgtcaccagctggtggggggcaacctggtcatcatgaaccccaccaaggcacaggatgccggggtctaccagtgcctggcctccaacccagtgggcaccgttgtcagcagggaggccatcctccgcttcggctttctgcaggaattctccaaggaggagcgagacccagtgaaagctcatgaaggctggggggtgatgttgccctgtaacccacctgcccactacccaggcttgtcctaccgctggctcctcaacgagttccccaacttcatcccgacggacgggcgtcacttcgtgtcccagaccacagggaacctgtacattgcccgaaccaatgcctcagacctgggcaactactcctgtttggccaccagccacatggacttctccaccaagagcgtcttcagcaagtttgctcagctcaacctggctgctgaagatacccggctctttgcacccagcatcaaggcccggttcccagcagagacctatgcactggtggggcagcaggtcaccctggagtgcttcgcctttgggaaccctgtcccccggatcaagtggcgcaaagtggacggctccctgtccccgcagtggaccacagctgagcccaccctgcagatccccagcgtcagctttgaggatgagggcacctacgagtgtgaggcggagaactccaagggccgagacaccgtgcagggccgcatcatcgtgcaggctcagcctgagtggctaaaagtgatctcggacacagaggctgacattggctccaacctgcgttggggctgtgcagccgccggcaagccccggcctacagtgcgctggctgcggaacggggagcctctggcctcccagaaccgggtggaggtgttggctggggacctgcggttctccaagctgagcctggaagactcgggcatgtaccagtgtgtggcagagaataagcacggtaccatctacgccagcgccgagctagccgtgcaagcactcgcccctgacttcaggctgaatcccgtgaggcgtctgatccccgcggcccgcgggggagagatccttatcccctgccagccccgggcagctccaaaggccgtggtgctctggagcaaaggcacggagattttggtcaacagcagcagagtgactgtaactccagatggcaccttgatcataagaaacatcagccggtcagatgaaggcaaatacacctgctttgctgagaacttcatgggcaaagccaacagcactggaatcctatctgtgcgagatgcaaccaaaatcactctagccccctcaagtgccgacatcaacttgggtgacaacctgaccctacagtgccatgcctcccacgaccccaccatggacctcaccttcacctggaccctggacgacttccccatcgactttgataagcctggagggcactaccggagaactaatgtgaaggagaccattggggatctgaccatcctgaacgcccagctgcgccatggggggaagtacacgtgcatggcccagacggtggtggacagcgcgtccaaggaggccacagtcctggtccgaggtccgccaggtcccccaggaggtgtggtggtgagggacattggcgacaccaccatccagctcagctggagccgtggcttcgacaaccacagccccatcgctaagtacaccctgcaagctcgcactccacctgcagggaagtggaagcaggttcggaccaatcctgcaaacatcgagggcaatgccgagactgcacaggtgctgggcctcaccccctggatggactatgagttccgggtcatagccagcaacattctgggcactggggagcctagtgggccctccagcaaaatccggaccagggaagcagccccctcggtggcaccctcaggactcagcggaggaggtggagcccccggagagctcatcgtcaactggacgcccatgtcacgggagtaccagaacggagacggcttcggctacctgctgtccttccgcaggcagggcagcactcactggcagaccgcccgggtgcctggcgccgatgcccagtactttgtctacagcaacgagagcgtccggccctacacgccctttgaggtcaagatccgcagctacaaccgccgcggggatgggcccgagagcctcactgcactcgtgtactcagctgaggaagagcccagggtggcccctaccaaggtgtgggccaaaggggtctcatcctcagagatgaacgtgacctgggaacccgtgcagcaggacatgaatggtatcctcctggggtatgagatccgctactggaaagctggggacaaagaagcagctgcggaccgagtgaggacagcagggctggacaccagtgcccgagtcagcggcctgcatcccaacaccaagtaccatgtgaccgtgagggcctacaaccgggctggcactgggcctgccagcccttctgccaacgccacgaccatgaagccccctccgcggcgacctcctggcaacatctcctggactttctcaagctctagtcttagcattaagtgggaccctgtggtccctttccgaaatgagtctgcagtcaccggctataagatgctgtaccagaatgacttacacctgactcccacgctccacctcaccggcaagaactggatagaaatcccagtgcctgaagacattggccatgccctggtacaaattcggaccacagggcccggaggggatgggatccctgcagaagtccacatcgtgaggaatggaggcacaagcatgatggtggagaacatggcagtccgcccagcaccacaccctggcaccgtcatttcccactccgtggcgatgctgatcctcataggctccctggagctctgatcctggaacccctccctctgcgccgcagctggacgccacctccgacggacacagccagccccttcctgctgccaagagatggccctctgggaccctatacggactccgccacttgagagcagtcctaggcccggcaggaacaccagacatgaacaggttgaagaactggagcgaagtgcacacctcaccatccttcagtctaaggaagaagggcaagccctgggaccaagag

SEQ ID NO: 1773 - protein, 1024 aa, Homo sapiens
MGTATRRKPHLLLVAAVVSSSAWSSALGSQTTFGPVFEDQPLSVLFPEESTEEQVLLACRARDPAYWKMNGTEMKLEPGSRHQLVGGNLVIMNPTKAQDAGVYQCLNPVGTVVSREAILRFGFLQEFSKEERDPVKAHEGWGVMLPCNPPAHYPGLSYRWLLNEFPNFIPTDGRHFVSQTTGNLYIARTNASDLGNYSCLATSHMDFSTKSVFSKFAQLNLAAEDTRLFAPSIKARFPAETYALVGQQVTLECFAFGNPVPRIKWRKVDGSLSPQWTTAEPTLQIPSVSFEDEGTYECEAENSKGRDTVQGRIIVQAQPEWLKVISDTEADIGSNLRWGCAAAGKPRPTVRWLRNGEPLASQNRVEVLAGDLRFSKLSLEDSGMYQCVAENKHGTIYASAELAVQAPDFRLNPVRRLIPARGEILIPCQPRAAPKAVVLWSKGTEILVNSSRVTVTPDGTLIIRNISRSDEGKYTCFAENFMGKANSTGILSVRDATKITLAPSSADINLGDNLTLQCHASHDPTMDLTFTWTLDDFPIDFDKPGGHYRRTNVKETIGDLTILNAQLRHGGKYTCMAQTVVDSASKEATVLVRGPPGPPGGVVVRDIGDTTIQLSWSRGFDNHSPIAKYTLQARTPPAGKWKQVRTNPANIEGNAETAQVLGLTPWMDYEFRVINILGTGEPSGPSSKIRTREAAPSVAPSGLSGGGGAPGELIVNWTPMSREYQNGDGFGYLLSFRRQGSTHWQTARVPGADAQYFVYSNESVRPYTPFEVKIRSYNRRGDGPESLTALVYSAEEEPRVAPTKVWAKGVSSSEMNVTWEPVQQDMNGILLGYEIRYWKAGDKEAAADRVRTAGLDTSARVSGLHPNTKYHVTVRAYNRAGTGPDSANATTMKPPPRRPPGNISWTFSSSSLSIKWDPVVPFRNESAVTGYKMLYQNDLHLTPTLHLTGKNWIEIPVPEDIGHALVQIRTTGPGGDGIPAEVHIVRNGGTSMMVENMAVRPAPHPGTVISHSVAMLILIGSLEL

SEQ ID NO: 1774 - DNA, 6137 bp, Homo sapiens
ccgccgccgcacccggacagcgagcggctgaggccgccagggcccaaaggacagcggcccagacaggggctggcggcccggccggccccggctcaccgactcgggcagcatccacctgccccagccaacacccttctctcgccccaggtcctttctcagcctccagctgggctgtccccaagctgagctgaggctcttctcctccgatccccacctctgcccggacatccaccatggggacagccaccaggaggaagccacacctgctgctggtagctgctgtggcccttgtctcctcttcagcttggagttcagccctgggatcccaaaccaccttcgggcctgtctttgaagaccagcccctcagtgtgctattcccagaggagtccacggaggagcaggtgttgctggcatgccgcgcccgggccagccctccagccacctatcggtggaagatgaatggtaccgagatgaagctggagccaggttcccgtcaccagctggtggggggcaacctggtcatcatgaaccccaccaaggcacaggatgccggggtctaccagtgcctggcctccaacccagtgggcaccgttgtcagcagggaggccatcctccgcttcggctttctgcaggaattctccaaggaggagcgagacccagtgaaagctcatgaaggctggggggtgatgttgccctgtaacccacctgcccactacccaggcttgtcctaccgctggctcctcaacgagttccccaacttcatcccgacggacgggcgtcacttcgtgtcccagaccacagggaacctgtacattgcccgaaccaatgcctcagacctgggcaactactcctgtttggccaccagccacatggacttctccaccaagagcgtcttcagcaagtttgctcagctcaacctggctgctgaagatacccggctctttgcacccagcatcaaggcccggttcccagcagagacctatgcactggtggggcagcaggtcaccctggagtgcttcgcctttgggaaccctgtcccccggatcaagtggcgcaaagtggacggctccctgtccccgcagtggaccacagctgagcccaccctgcagatccccagcgtcagctttgaggatgagggcacctacgagtgtgaggcggagaactccaagggccgagacaccgtgcagggccgcatcatcgtgcaggctcagcctgagtggctaaaagtgatctcggacacagaggctgacattggctccaacctgcgttggggctgtgcagccgccggcaagccccggcctacagtgcgctggctgcggaacggggagcctctggcctcccagaaccgggtggaggtgttggctggggacctgcggttctccaagctgagcctggaagactcgggcatgtaccagtgtgtggcagagaataagcacggtaccatctacgccagcgccgagctagccgtgcaagcactcgcccctgacttcaggctgaatcccgtgaggcgtctgatccccgcggcccgcgggggagagatccttatcccctgccagccccgggcagctccaaaggccgtggtgctctggagcaaaggcacggagattttggtcaacagcagcagagtgactgtaactccagatggcaccttgatcataagaaacatcagccggtcagatgaaggcaaatacacctgctttgctgagaacttcatgggcaaagccaacagcactggaatcctatctgtgcgagatgcaaccaaaatcactctagccccctcaagtgccgacatcaacttgggtgacaacctgaccctacagtgccatgcctcccacgaccccaccatggacctcaccttcacctggaccctggacgacttccccatcgactttgataagcctggagggcactaccggagaactaatgtgaaggagaccattggggatctgaccatcctgaacgcccagctgcgccatggggggaagtacacgtgcatggcccagacggtggtggacagcgcgtccaaggaggccacagtcctggtccgaggtccgccaggtcccccaggaggtgtggtggtgagggacattggcgacaccaccatccagctcagctggagccgtggcttcgacaaccacagccccatcgctaagtacaccctgcaagctcgcactccacctgcagggaagtggaagcaggttcggaccaatcctgcaaacatcgagggcaatgccgagactgcacaggtgctgggcctcaccccctggatggactatgagttccgggtcatagccagcaacattctgggcactggggagcctagtgggccctccagcaaaatccggaccagggaagcagccccctcggtggcaccctcaggactcagcggaggaggtggagcccccggagagctcatcgtcaactggacgcccatgtcacgggagtaccagaacggagacggcttcggctacctgctgtccttccgcaggcagggcagcactcactggcagaccgcccgggtgcctggcgccgatgcccagtactttgtctacagcaacgagagcgtccggccctacacgccctttgaggtcaagatccgcagctacaaccgccgcggggatgggcccgagagcctcactgcactcgtgtactcagctgaggaagagcccagggtggcccctaccaaggtgtgggccaaaggggtctcatcctcagagatgaacgtgacctgggaacccgtgcagcaggacatgaatggtatcctcctggggtatgagatccgctactggaaagctggggacaaagaagcagctgcggaccgagtgaggacagcagggctggacaccagtgcccgagtcagcggcctgcatcccaacaccaagtaccatgtgaccgtgagggcctacaaccgggctggcactgggcctgccagcccttctgccaacgccacgaccatgaagccccctccgcggcgacctcctggcaacatctcctggactttctcaagctctagtcttagcattaagtgggaccctgtggtccctttccgaaatgagtctgcagtcaccggctataagatgctgtaccagaatgacttacacctgactcccacgctccacctcaccggcaagaactggatagaaatcccagtgcctgaagacattggccatgccctggtacaaattcggaccacagggcccggaggggatgggatccctgcagaagtccacatcgtgaggaatggaggcacaagcatgatggtggagaacatggcagtccgcccagcaccacaccctggcaccgtcatttcccactccgtggcgatgctgatcctcataggctccctggagctctgatcctggaacccctccctctgcgccgcagctggacgccacctccgacggacacagccagccccttcctgctgccaaggtggcctgacactgtgccagagagtggctggttttaaatacctactttaaacagtgccctttttgtaggaggtaggatattttatattctgccgcaggatagaacccacgcaaggattttctttaaattgagaggcaccaggcagtaacttccatgatgacactgacgcctatacctgagctctaggctgcctggagggaaggaacaggcccatgggaagaagggggttttaaaaacatgtcttcaactcagcagagatggccctctgggaccctatacggactccgccacttgagagcagtcctaggcccggcaggaacaccagacatgaacaggttgaagaactggagcgaagtgcacacctcaccatccttcagtctaaggaagaagggcaagccctgggaccaagagctctcccgccttctccctcgagcagcagcaaggaccctgacgctgtccccgataactccctaggggctcctgcctgcccaagcggctgagaaccagcgccccgatgcctgaggctgggagcctgagccccttcagctttgaggggggtgatactccaggctgtttggggtgggagccaaaaagagttgagaggccagggcccttggtggaaaggggcaccagccttggtctgagatagtcacaacccaggtgacgatgccctctcagccaacactgccaacctgaccctgtcatcccgattgacagcgccacttcaggtggctgggtgactaaagggcttgtcttggtggggtctcccacccctccaagacccattctgcacagtccctccagggtttgggcaggagatggccaatcatgcgcccacctctccagtgctgcctgcagtcagctcggcctccccgacctgcagccccagactctgctctcccagcactgactcactcctgcctgggaggggaatgcagcattcatgctgtgtgtcctggtattgggaggtttctgggaagggcagaggataaatgtggccctgcctgctcccaggtatacctaggaccacctggccagatccgctcccagacggccttggactgcttgcatttccccggagaaaaaggggttaataaatgggccatcctttcctgagctctgggtatactaccagtcacagaacgtcagagctggaagaagccttagagctcaacttcttcaagcccctcactttacagatgaggaaatggaggtggtccagagagggtctgggattcccaaggtcacacagcccagaagagatggggctgggttaagaactcgagtcttccacctttctgttcaaggctgtttgtctacccagaggaaggaggcactgctgaatggctatggcctggctaagaaggtggttagtcagtagggtatgaaaattctacttcaaggggttcggattggtgatcatggggattggcatggctgggttccagtccaaggtgtgggcagagcttctaccaaacttcaacatggagggctgacttgaagctccctgtccccctcactcttgccccaagaaaagaggccaaagcaagagcagattccctaggcaagagcagcagcacaactaggaaaccccaaagcccatgctccgacaggtggcccttcacagggggcagcgggacaggcatcttgaagggcatatgtcctcggaagctccgagcctgttttctgtagtttatagttagagctctattttgttatggttttttaaacttttaagtcctgctctattttcctgggcaggtttatgttgatgtttacccactacaattttttaaaaatataagctcacatgccttttccctgccacagccaaacccccactgcaccctacccacccacccctagcccaggtcagctttcctggagctggctaatcaaagcctcctcacctcttcccaacccttacaagcaagggtgctaggggctcagctatacgaccattctccctgacagggagtccaaacttggcctagcatccctcctggcccccctctggccacgacttggcctgtgcctggttctctatcagaaaggggatgctgaacaaaacctccttccaagttttatccaattcgttcctcattgcctcgggctgcatcaggggaagcaggggacaggtgtccagttgctgggccgagggaggagctggtttggcataggacctaaccagtgaagctagaggctacagccactaaacttgcttcaggccaacgatagttactcacaagtaagtaccttaatgctaatgaggtccactaaaaaggggaggaaggcagacctcctgggagacccacgaagggtttttagccagggaaaactgagccccaggaaaacctaaccactgggcaggcagaatttgtttgagggatagaacgacaacaaaataaatgttcctgcagcctgagatttcaggtagagtactgactaaggtttaataagacaataggtgacctgaggacatgcaagcttgtaaaatgcaacagcctcctgctagagtgacttgtacatgagcttgcttgcagaagactagattagatgtttctcaggatcccctcctgcgcaggggttctctgattttcgtgttctctgcccagatgggctgggggagttgagagtgtgcttattttcactgcgatcatgagaccacagttctgggttatctcctctcatacatcaagccccag

SEQ ID NO: 1775 - protein, 1024 aa, Homo sapiens; identical to SEQ ID NO: 1773

SEQ ID NO: 1776 - DNA, 46625 bp, Mus musculus
  misc_feature (1)...(46625): n = a,t,c or g
atgacgaatccaccaggacaaagcgtgtcagccaacacagtggctgagagccatgaaggggagtttggctgcaccttaatggacctgcgaaagctcatggagcttcgtggagctgatgcagtggcccagatcagtgcccactacggaggggtacaggaaatctgcactagactgaaaacctcccctatagaaggtaaaggccatttcaagggtcggggattgggggcagtgagtaggattttgaaatatttttgtctagcttctagggaaagtccggttctggagatccaataagttgtgtttggtctggtggggagagcacagacctctaaagccgaggtggccactgagggagggcatgaagagctttcctcctctaccacgtttaggaactgtgatctctgagtcattctctcctcctacttctgtgtcggtccatcgtatggagggtccttatttattatgtagatgcacttatcagtatagtcaatgtcctcacttaattagattttgattacggaagagcttaagatggacatcttcctcacactgatcttaaagctcaatggatgagaaaagacgacaggaagtagtattccagccatctgagtaccttactgtacacagaaatgggttggcatatcataaatatgtatttggataaattaatattttctgtcttggagtttctgattttttttaaccctgtctaataaaaaattttccccaccatgtagggtccaaacccagggctttgtacagcgccccgacattaatctgtagcctcagcccactgttttgctttttaatttaagacagattctcagtacattgcccagagtggacttgagctcactctacagtacaggcaggatgtcaggttatgatgttacaggccaggcatatatcttataagctctgagttcaggtatttgaaataatgtttatagctagcctgtagagttactgggattaagtagtacagtgcatatgcacacatgtgtgtttgtgtgtgcatgtgagaactgataataggtgttgaataaactgaatataggccatatgcctggagattttcctagggtgtgaatgcccatgagtttcaaagaaacataatctctactctggttaaggtatgtgtgactgcagctgctgtctgttccctgtgctccctgtcatctctgaggcctgattttagggtgacagtgcttagttgctcacagtcagtcccctgggccttccagcttgtgtctaatactgccttttggatactgtccacttcctgctagctgaagttttattattggtgatggtggtggtggttttattatttgcttattgaaacaaggtttcactcagtagcccaggctggtctcaaactcgaatgaatcatcccatctcagcctgccatgcacgagaacttatcatcggcatgcgctgccacccccaccaccccctactgtgtttgtttccctgggacagtctcactctgccaacaaggctgacctggaatttggtgtcctcctgctttagtttttctaagtgccaggattacaagcatgcaccaccacacctgtcccctgagtgactttctcagggacttctacagagtataggctgtaaggaaagcctgtaccttcttgtgctttcctgagacgatgcaggtgtttacagacctccatcagaagggaagctgaatctttctgttttcctccttttatatttctttgacaaagaggaacttggggatccagtaagctagaacctggggggctcctcaaaacaggatccatactttccttccatctctctaaccctctcatatagctatgacaaatagccttctctaagaagccagcctgttgccagaagaccattcgcagatgcctctcaacctcataggattttgtcacctatgggaggctcctgcagattaataatgggaataaagatacgggagtgaatctagattctagttagaaaccaatatgaaataagtttgagtagactggcgttggggagcattgtgcttaaaacccttcttacgcaggagctgagaggagactctcatgagcctggacatttgaagctggcatggctggggaggggagtggtagtagtaaggaaaatagagcacccctttatccttttatttttgcttggattgataacatgcttagtgtagatagaactctttaaatcatagctcataaggagccttataggagcttgagagttttgacactaacgtgattttgttagcctccgtttatacaattctagaggcagatatgacttagtttttaattaatttttctcactttttattggttaagtttgttgtttgactagcacctaatttcaatattctctgtctaggttaaatggtttaaaggccttgaggtctttgtaccaggtagaaaatgatggaatagtttctattttctgacttacagcctatcgatgtcctgttgcctcttttgtacagaattacagaggacttaagataggttttgccttttaaagggtgttttacttgtgtgtgtgtgtatgcctgagtgagtttatatgcatcatgaaggctggagcctaaagatgccagaagttggtgtcaattgtgagttgacatgtgggtactgggaactgaacacggatcctctgcaagagcagtaggtgcttttaactgctgagctatctttccagcccgggttttgcattttaatgtccgataagacatgggactgagcccagtgtgcatgctaatgctgctcctgcattgcattcatgtgttggagtacagttgctcctcagtctagagtaggttagaataaagaggacctgagagtggggacctgggtgacttcagtatttgactgtgactggccacaaggtttacagagtgacctgaaaagaggagggacatttagagaaataagaaggggcgggaaagatgtggaagaagccacaggctccagcctacatttgtttgtttgtttgatgttatgtgtgtctgtgcattgtttgcatattatgtattcgttccatgtgcaagcctgttgcctggggagttcaaatagagtgtcagatcccctggagctggagttagagatggttgtgagtcaccctgtgggtgctttggaaaggagccagtgctagccatcactccagccccaagctctcagtctttatggctctacataaacaaaagctaagatgaagactgggaactagcgggacactttgtcagtgcgggcttgtcatttagcaccaatggaacccttctcattttcttgcttctttcccacttccaattcctttctttaaaaaaaaaatgtttataataccatattatcaattatgtctaataatgggcttcattacatcattccatacatatgtataatgcatttttatcatatccaccatcaccttctccagtcctcccctccccctccccctcccttcatcttcccagctcatcccccccaatccccaacccccgtctactctcacctctcatgtcttcttcttcctcctcttctcctaacaacacattggatttcaccagagttgtcacataaacatgggtgacaggtcatttacaggagcatggatannnnnnnnnnnnnnnnnnnnnnnnnnnnnnnnnnnnnnnnnnnnnnnnnnnnnnnnnnnnnnnnnnnnnnnnnnnnnnnnnnnnnnnnnnnnnnnnnnnnnnnnnnagggttgggcctcataagcccttcccccatcccaatttttcttatactctagcttgacagcacaccattgtgtaacccagcctagcttcagattttcaaccctaattcctccacacccccttttgttttctcatcttctctctctgctccatttccagaaatctctccaagtcccagagtgcagagcagctcaggtgactggggactagaagagagcccctgttctctaagcttgccccacccagctcggggccccctgaagaagaaacatgtgttgagtctggggtagggttccccttgccttaaggatagcaaaaatgttctccgtgtcgctattccctggtgtggagggaggacgctgggtaagactccttgtgactagatagaagtttgttttctttttcccacatcggagcttcccatacgccccctctgtcagagtaccatagttaggggaaacactgttttccagggagcagatgggttgggaagtgggaggaacttccgggcacagagaagagaggtcagaaaagggagcattaaataaactttgaatgactgacacgaggcttttttcagatggctagagacaatttctattgcatttggatatagataaattctgcttggatcttccatctcctgttccacgtctagcttccacattgtccctccccacataagatgatgaacacagcagttaagatcatctgataggccttccagcgacatgcaacagctaatacctactctgtagatgacctcacattggtgaccatgacagtaggcaccgtccctcctcttacagagcttacaggccaatagaagttacacacaaatgaaaaataattctaaaatactgccgctgtgctgtgtgggggaaacaatagtgttgagggagcatagagcacaggagctaagatgaaggactgaaggagaagaaaggggcttgggagcttgtgttagacccgtttctctgtgttatctaagacttgccagggatactccagcttggccttgctatatggtgactgcatcccttccagagtgctcctagtttacaaagcaagcatctttgccttccctaactactgggtagctgttgggtttagggagatgagactcttctgagaatagccagagggaaaagaatctgtttgaagacagaccaaacatgattatgattatgatttagaggtcattaatgtcaagatttagattgacagctcctgtcaccttaagacctctggggttttcctgtgtactacctagaaatggccatcttcccattatctggaacttactggggttgggcttttcttccaaatccctcttccgccaccatccccggaaaagtgcaggggatctaactggaggtctgccgatgctagacaagcgcccatcactaagctctcacctcggacctgaaacctctaatagcgttatcagtctggacaaaaattgattgatacacacccagtaaatattcacttgtggcacatctgaattgctgttagtccttcaaacactgaaactatttccataataagatacgcaggcctagaaatggacaaagtaaaataaaaagttctagcattttctccctgctctccaacaggtagaagcataaacatacacacacacacacacacacagagagagagagagagagagagagagagagagagagagagagagaaagagagagagcacggtttcagggaaggttagtgaagggaagtgcagagctggtgagtgaatacaatgggaagacaggcacctggctagtttggttttctttcttctctagtattcataatccactctggaataccagtttggcagagctcatggatctgaaaggtgcagcttttcatcctggcctctgccccttgccttctccttggactcctgccccacctctcttaggactgccaagttccttcctagcatcttctctgggcctggctgcagagactagcgttctgtagtccactgagccgccacacctccagtaaatctgctagtgcttgtgtaaggtctcaccctggagaaacaccttggagggagggaaagggatacatgtgcacagcctgattcaaacatctggaacgaggctgctggcctgggtgtgagcggtgtgggccaggccagcggcttcattagagaaattcttaatgctctgtggaggagtgagaggggttcctgctaacatttggaggtagaggatgggaggaatggggaaaatgggggtgaatgaggtgtaagtgccctccctcaccccaaaagggaacgcctctagcacccttgaattttcctgtctggtttaagcttcatgctgagagctgagtgaggccaggagagagctggccaggcccagccccacactctgcctacccttagccagccagcctctcctctctcagagctgagcatctgagtttgctcacacaatgtactaggcaggcgttagagatcttgagagtatagctagaacttctgggcctgagagcggtctctccttttcctccccccccgtcccccgtcccccgtcccctgtcccccgtcccccggcatgggacctctagcctggccagctcagcagctctgcagcaactcttccaagcatttcagtgtgttcttgagtttggcttgccttttttatctatttagtgtttgaatagtagcctcctattccttctgcctctgaattacactccagcctctagtttgaggtgagtgcattgttttttgttgtttgtttgtttgttggccttctagtcacagagatcctcctgcctcacctttcaaatgctgaaataataggtatgctccattcctggctcctactttgactttgacttttttctagttagttagttagttatagtttattttatgtgtatgaggttttattagcacatatatatgtgcactgtgttcatcatgcccggtaccagccagaggaggtcagaagagaccatgagaccccctggaactgaagttagagatggctcacagccaccttgtatatgatgggaactgaacccaggtcctcagcaagagcaacaagtactcttaaccactgagccatctctctagccccttccttttctccttttttaggcagggtctcatgtaggctaggctggcctcaaacttgctctgtagctaaggatgaccttgaacttctgatcgtcatgtctacatctccagagtgctaggatttcaatattgtactgccccctcttattttatatggtgctgacaatcgagcccagagctttgtacacattaggcaagtgcactaccaactgagctatgtccccagctccttaacccattgtgttgccttgagccttcagcaggagggaaagaaaattggtgttccctcactgactgaggcagccagtcgcagctagccttaggagtggggttttcactatttttatttagctcaaaggtgtgagccctgggacaatgacactggctagagaggagcacgtgcatgcaatgcaggaaggtgacaaagcagaggggtaaagagggtgaaggctctggggaaccttgtctcccctgtgttagagctcggatggaggaggctcagggttgggggcaggggcgtgatgaagacaggccctgaagacaaggccactctacaggaacagtgttgtctagttcaatgtcctcttactttgaccttgagtctgtccctccatctcaaggctgggagtccaggacagcatgtccccctggttgtgcctgtattgaagaggaggtgttgggacaggaagggtgttctatgctacttgaaagcacagcatttggtcaggagcactagctggctccatccgcagacacctctgatcttaagcctctcatccccttagaagccttggaagtgctttaagtaggacttgaggatagatttttatgttagaggtgaagactgagaaaggaaccaggtcctcggtaagccaggcaagctctctaccatggagctagtacccagaccttgaaatgtaccccaatgtctattctcatgtaccaaaagaaatgactgcctttagtcaacctcaaataacgtctcccttgcactgtccgtgtggaggaggcttttcatctacctcctctggcaaggcatcataattcagatagctgggaagtccctcatgacctagatccaccctttctgaggctgagctgattctgataaacggtgcctctacccacaccatctttggtgtgaacaggagactaaccaggctctctcgtgcaggagccacaccgctataggctggggctccactcctcccggcctaggtcctgcacaggcttatagcagacacgggtgcccactgctcctgactctggcctgcccaaacggagcagacaccctgcagctcccagcatgcgtgcaggcagtgacttcacagactcacattctctttgcctctcccaacttatgtgctcagcctggttctaagggctagacgcgctctcagtttgggtggggctgtctctctcatgttctctatgaaaatttgtctgagggcgaaatttccccgagaatttctcgggaaaccccttttcctgtgttttctgaatagccttcttgccaagtcctccttccctctccaggaggctgtgtaagtatttgagaagccactgtggagttcggggcccaaaacatttttctgggctggacaagtctttgtgtgaagttaaagctgctgagatcagggctggggagcctctctggggtggaaagaatgaagtggaaagcccaaaattgggaattggcagggctcccagacccacatggctttcctgcgcaacaccacatgtcagagaggattcccaaggctacccaggctaacatccagggcccgccctggcctcctgcggagctctctgggaacctgggcagccacttgacttcttaaggaagcttttgtacagtctgtgtgactgaaggtggggcctgaaggtggcaaatagctaatgggtgtggggcaggtgaaatggctcagtgaggaagggtccctgctgccagatctgatgatctgagtttgatcccccagaccatacatagtgaaaaggaaaaaacaaatttctacacgtgtctcgagcactcaagggtgcacgcatgcgtgtgtgcgcttgtgtgtgaaagaaaaaggcaagagaggagcaagcatgtccctttgaggaaacatctaggtgagggcaagtcccacctttttatatgatctagaatgtattttgttttgtttgtttgagtccagaaaaggtcataggagcctttagtgagctcaaacttagtgagcgcaggcttcatgaatgggctctgatgaacctgatgcgccatccctgaggacaggaaaaaggcaggatcccacagaggcagccctggcttgctcagaggtacacaagtgactgtgtaaacactctggcataagaaataagatggccatttgcctggaagtaccagcaaacagggtaagttggtcacttagaagggagcctccgttgagccctactgttctcgtgtcccaaaatcctttgggcagaggttggcaaccagctgcctcctgtgggtgatacagaccctgcccctgctaatgcaaggagcctgtgacctcttcaagccttagttgccttgagcatcaaattgggttcatgataacttcctccactggctacagatgtttgaacgagaagtgaagtgagcctgctgcagtgcctgccacacagcaatcacttgaacattagcaacgttgttcattactcatccactgggttccttcaccaggcttgagtgtgtgccttgtgccaggtactgctgctataggccttaagaacaaagccaagcaccctgctctggaaggaggtgagcaagcaatggatgaataaggtctccgcaagtaagggatgagaagaccttagagggaagctgtacaacagactggaaaatggtgagcgccacggctgaggacagccttagcctggcggagatggggacagagacctgaaagatgacagggacagccctgggagaggttctgctagggaagggggtggtacagcagcagcagccatgtgcagaaacggaaggaggggtagggggtgtgttccgagagtagaggaaggtatgctgagccagaacgctatgaagactgggaagtgggaagagatagataaacactggaggttcctaagtagccttagaggccaccaaaggtctcggtgcccagcttcactctgagtaaaagccacatcgggttttaagtaagtgagtaacatctttgaaaagatctttgtgggcagaggagggggcaggaggtgatcattagaatattgagaacctgaggagctaggtggccacccctaccctgcatgatgaggtaggttgctctggcagactcaccttggaaagggtgttagtcccttaaattgatatttagtaggtttttagagatgaggttctatagcacaggctgactgggagctcaccatgtggtccaggctggccatcctcctgctttaatctctcaaatgctgaggaaacaggcccgagtcaccacagcaggctctggtctttactatctgacatcccgggtgccctcgcaatactttccggcccttaccaaaaggagggaagaagagtggttccctcccagtgtggtgtgttgtggatcttacatctttgcgacacaaaatcccctcaaaccgatctgtccacccagagctgcaatcccaagctggctcaagccctgctctattcggtcccctggggcaaagaatcagcaagtcccgcctcctggccaccctgcccctgcaagcctgggcacccagatgccctgcccagaacactcctctcccagaccctcccctgcctttcccactgggaacctgacttcccatggcagggcagacagaggaggctgaggactgtctggaaaagagctcaatgagtcttttcgagctttgaaagcagctttgctccccggtggagcccgactgtctgctgagctgcagtgaggggtttactgctgggttatagggccctgggttatagtctcaggcaccgtgtgcccaaacggttccctgtcccttgcctcctaatgaatgaaaatggcctccagccccacccttcacaatatgatcctaactatgccatcctggccgacttcacctagggcctgtctcacactcctctctctcagagccagaaggttctccactccagctgctgctgatttattttgtgagtccccgggagtggaggccacttcccaccctgcaggccatattccctgcgaacttaattgcccattttcatggacctcccccctccccaacttgttcagtggaaagagaatgttcgcccacacaccgagcctgtctgtttcctcgggggttttggttgggaggcctctgtgttgagcgagtgtggagtccctgacatcctgacctccactctgtccttgctccttccaggcacacacatttccttgctttgtgtgaagctcagtggagtatccctgccccggattctgagtgtccttggctgtcgacctgttttcaagacaaagagtgccccaccctacctgtgggggaacccattgaatgggcagccaacggcatccagtgccaaagccatccagtgccaaagccaaagccaaagccaaaaaaaaatctaatttgtcgcaaatatgtgaacaacttaatgaataccaacttggattgactgctaggcgggctttccctaccacctctgactccagacgaggggccaggattctcaggaagctactgagtataattctgcctccccacccccatgctgggagagaaagggagaggaagggagagagaggtgttagggttacatgttctgttttagtggggaaaatgctggtcgtcattaactgtatagtatctagaaacttcgtaaccttgcttggctcttattcagcctgagctgcaatactttgtctagttgataccaagtacttagccactgagtaaagcagcttgctgggggttgcatgagaaatggaaaggcagggatgatacaactaaggctaccttgccttgagagttctacttcagtgatctacagctcctagaacttggaatgaagacacacgggtagcctctgcctccacctgcatgaccaagaacaggtagctagttctttctggcccaagcacgtgtgagccggcatgttcgggtcattgccagaatttgcatactcctctgaggaaagagtccctgtgcatcccaagaacattcttgtgcttctgttcttagagctagggccttggtgtgcaccacagcccccaaggaacagatgacatttacttagcctggtcgctagaaacaaaaggccctgtcctgaggccagcttgtctcccgtattcatttataaacttttaaagccctgaacaaactgggctggttgagcacgtgctcactgctccgcagccctaggaattataactggacatggggtctcttagttttgtttgtgtgtttgtttgtttgtttgtttaatgtcttttacaaacccctacactggtttgtaagtcagaccacatacagtgatgtctttcaaagcagttagccctaaggtacctctcagaagggccctctggaagaaagtgagccttttaaccatttttacccattgttcaagtcaacctatcaagacaagcctccttgtcctctgcttcctgcctcctgcctcctgcctcctgcctcctgcctcctgcctcctgcctcctgcctcctgcctcctgcctcctgcctcctgcctcctgcctcctgcctcctgcctcctgcctcctgcctcctgcctcctgcctcctgcctcctgcctcctgcctcctgcctcctctgcctcctgcctcctgcctcctctgcctcctgcctcctctgcctcctgcctcctctgcctcctgcctcctctgcctcctgcctcctctgcctcctgcctctgcctcctctgcctcctgcctctgcctcctctgcctctgcctctgcctctgccaaggctagttttccacctttccccgttctatgcgccacaaagcctcgatgcaggatcaagtgtgggctgctcaggagttgtagttcttttcggtaaagatccatccaccgttgctgacaaggaactcctgccttatgctagattctggcttttacatcttggtttcaaccacgacagtcttgctggtcggacacttaggaaaacctgcatcgtggtggtagcacccacatcaggcagctcgcaagcacttgtgactcctgctccaggagacctgatgccttcttctggcccatgcaggtgtacacaacatggaatatactttcacagagagacacacagacaaataactaataaataggcctttaacttgacttctgatatcactctaccctgtgccttcctctttctgcctctctctctctctcttgtctccttttcaggtctatctgggaaccctgcagatttggagaagcgtagacttgtttttggaaagaacgtgatacctccaaaaaggcccaagactttcttagaattagtgtgggaagccctgcaggatgtcacgctcatcatcctagagatcgcagccatcatctccctggtcctgtccttctaccgacctccgggtggagataatgaaagtgagtgtctgagctgctgcccatggctgatctgagtcctttccacaccaccaaccatattaagtaccagtggttttcaggttatagtacaaaatgttcttcttacccagcaggctctacaaaagagagctagtaagccattctcctaaccgttccccttcccctaccacatccttattcagaacaccagccatcttgtgtccttacctttgcttcttagtgtatcccaaccataatgattggcattgtgggaaatagcagtgagcctggctgcacatcctgtgacttgcattggcatactttgtgctgtttagtagctaacacaaattagacctagtaatgatgagagatcgctccagccgactgatttccttggaaatcttccacttcagagtctaattttctattgttctctcttcgtgactgtccaccttgtggaggttgtgtaaatacctccctcgtttcaatgattctttcttccctttctggatagtctgtggtcacattgcaagtagcccagaagaagaggaggaaggagaaactggctggattgagggggcggccattctcgcctcggtgatcattgtggtactcgtgacagccttcaatgactggagcaaagagaagcagttccgggggctgcagagtcgcatcgaactggagcaaaaattctccattatccggaatggtcagcttatccaactcccagtggctgagattgtggtgggagatattgcccagatcaaatacggtgagagcaccatgtttctctagccaacaacatccccctccccagacatctgaagaataggtccattgacatgaggagctgggagtttctgaaagcctctgctaacccgtcagtgagaatttaagggggttgtgggaagaaattctgaagaaagccatagccaaaactcgtccaagtcagacttttgtcctgtatggcttaggagtaaaaatatggaatatttaggctacaggaaggtgttgattcaagatatgtgtggcactaaggatcaaacccagggccattgcagtataggtaagccctctgccacagagtcccaacgcagctctagagttatatcctttttacccctttatgtggaggctcttgacattctcatgagaccataaggagagcatccctaaggtagagtggaggagttggatggaggtccgtatgactatcccctaccaagtcttacccgttctcccttattgtcaccctttcccttatgcactaggtgacctgctgcctgcagatggaattctaatccagggaaatgatctgaagattgacgagagctctctgacaggagaatcagatcatgtcaagaagactctggacaaagaccccatgttgctctcgggtatagtatctggttgcccaggtttttatcacagcctctagatagtagggtcaagggttcggggatctcttccctctattggctccaagctttcttcttctcttggtttgagtcagagtagaaacgtggttattcctgatgcagggatgtcagtaacctgaaagacgtttttcattaagtgttacaggagttctgttgtttgagaggatggcataaagttaatatgttaaccttaacctctgtctccttggcctgttttaaacaggctcatctagctttttcttgctgcctactaaattaattacaatccacagagaaaagggagcaccatgctcttatgtttgtatttcctaacagatcacagctaagaacatcagacagcactcatccctctctgccttctcctttcccttctgtagggactcacgtgatggaaggttctggacggatggtagtgactgctgtgggggtcaactcccagactggaatcatcttcaccctcttaggagctagtgaggaagaagatgatgatgacaagaagaagaaaggtaaggggcgtgccgaatgagattctctcatccctgtgactgaactaaaggtcggagagcagatccagacggaagagctgttaggaaagtctgccgggacaaagcaacagatacccagcctcctaggcaagatgcaaatgtcagttgtgaggctggagaggtggctcggtagttaagagcacatattcttgcaaaggaccgggttcagttttcaggccccacattggcagctaacaaccatctacagctctctagttccagggaatcctgtgctttcttctggcctgtgtggacaccaggcaaacccatggtacatagacatatatgaaggtacacacacgtgcatacacacacactcgtcgaccttgtgtctctgaggagcaccaatgaaaaccatcgaaccctgactcaaatccctcaggtcagattgcatttcctcagtccctgtgtcttcggtaggttgtgaggggtagcccagcctgaaagagcaggcaagagctccagccaaactgcctccatgacgtcctcctcttcccttcccttcttcctcaaggactgaggggtaaaaatgaactatcccagctaagagggaagtgacttaaagcaaaacatggatcccacagaaactgtgggctctccgctgaagacaggcacagctggaagatagggagccaagagactatgttcatcccgcaattaccctagtcttggtcactcacttcttcctgaggtaggaacatcaggagaaagagacccagatgtgaaagccagactcaggcctttttttgagcattccttcttcctgtgggaagaaaagggtttctagcacttggctgagaatcatctgaggtacttagtagagagaagcttatgaaagagtaacactctctcagaacccaactattcatttttacagctgccctcagctgaacacctagaaagcttgcctagggcctgttgaattgacctgaagatgcattttagggcctcgccacagacagctatctccagcctctctctccctaactcccaccctcattttctcaagagctgtgactcaagacaggagcatcctccctcctagctgcaggagaagctcaggcatgaccgtgtgtgcagctgtctgatgcttggctcccagggatccatttgaatcgagataggaaggatgactgagcagagacgtgagcttccgttccaagtatctccctgccccgcagacctcctccttcactgtcacccttctgtgctgggaaaggacagaattggatatcagatcatctctttattctagttactttgggtctccaccccgctttttctttcttgttcaaacaggtaaaaaacaaggagcccctgaaaatcgcaacaaaggtaacctctccacccactcacgttccatctctacctgccacgctcaaaccagacctctccaggccatctgcctccctgccctctccataatctgttatctgctgctgtggcccagtgcctcatcctgaggatggtgcagagatctgggggtgggcttcaggcagaacagcagcaccctctgctgttagcttgaggaagcaatgtccacaattctttggtaccgatccgctcttctcagcgctgagctctgcttcactgtccgcggcagcggcagtttctgggttggaagtcacggtggaaggtgttggccaggcagtccctgcaccctcctctgctagccgcctcatgggtgtcttctggtttgtatttcttctctgttcgtctgctctgaggctttggaaagagacatttccctctgcctctctgcccacttctttctttgttctcaccacagtctgttttgttcctcctgatatggtttgtgtttctcttggtggctgtgtctgcatcccatctccgtcttgtttgtgcatccgacagaagagaccgtaactcaggagggagttcctaagcaaacagtgacgttggagggggacggggaccagcaggaagtagtcttgacatggctcctaaagtagtttttcccccattacacacatcatagtattcttcagaaataaagtcaccatattggatcacccgggcttaaggagaaagaacttgaatttcaggtctctttattcttcttccaaaggggaaatcctgggtttgatgtgcccgtgctctctgctttgccttcctctgtgtctttagagcagcttctattcttcaccccacccccgccccaaaatactcaactcaggtcctgctctgtacctccttcttcccttgtccttcaacttttatagaagctgaaaaataactttggtcttgggaggggtggggtgagcatctgtctttcttccctgattgggggaagtgggttttaacagaatagactagggcccttatgttctagaaacatcagccctttgatccctttctacagtaaacattccctgttttaaggtctggattccagagaggatgcttagtaaggggatagatggcctccatggtgtgatcaatccccttgttgctataaacctggcctgtggctctgagggatgccaggaagttgtggtaaagagaaaatccagaccgagaagcatcttcgacctcatctccagttgtcagacatgtcccaaaggccctagtggagtcctgtgtctggcatgggtgaggaccagtcaggggtctaaggaacattccaggaagagacagaagggcatcttgccttccacctgcctgccatccactgctatattcttgcctgctcacttgctctgtccgtgtgtctaccctagcaaagacccaggatggagtggccttggaaatccagccactcaacagccaagaggggctcgacagtgaggacaaggagaagaaaatagccaggatacccaagaaagagaagtcggtgctgcaaggcaaactcacacgcctggctgtgcagatcgggaaggcgggtgagtggttaagcctgcctcccattgcagatttgatgtgatgtcgccacatgtgctggctgcttcaccacatccagcaggactggccctcaggtggctcctgagctccagagagctgtatctttggtcactgttgggttttgaagggaagagatttcctcctatgtagaaaggttaatagcctgaggtctctttcatacaaatattgggggggggggctgtcatgctaacaggaaggagaccttaagaactttcaactgtcctggaatccttccaaggacagagtttgctttaggcagttccctccttagttgtggaatcttgtggcccagcacagagcaataaatacacagtaaagatgtggagaccaaggaagactgcttagtctattcaactctattcacaagaggggtcttatagccagagtgacaagtggcttctccatcacccacccctacccttccctcccatcctctggccaaggggaacagcaggaaaaggaaccttgtgcagtgtcccttgaggtgtggtctgtcagtgagtattctgtgacctcagacttctgcttgccaccaccatattcagcctgcttctctgggcacaattctccagatgtccttgctaaagtgcagactgccttccgaaagtctatggcggggcctgagagcctccaaagatctgtgatagacacaacagcagcaaccgtttacagcctgctcctgagtagccacatgggtccagtagctgtctcactggacagcaccaagtcagagcatttgagtatcccagaaagttctggagggagtgtattgacctaaccaattcagtctggtccagtacttagcttattctgactaccttgaaatcctaagtatagactctctgtggatgagctgtgagtacaaaaggcaatcgttgagccaggtacccaggtcagaaacatttaagtagatctcctgagccgcattcttccttggggataagaattacctagagattgcccactggtctccagtttcttatttcacttatcaatctagtctagggtgacacaaacaagatgacttccaacccagagagagagagagagagagagagagagagagagagagagagagattgattccctaaatttactataggtaccttgcttccttacgctagtcctagccttaatcaatccaaagccaaactaatctgcttccattgacattatcccccatggcctttctgtaaagaaagcccctgaagcattgatatggctttaatacgagtgtcccccaaatactgtactgctgctaggtacacattaatccttagccctcaggatagccactgatttccccccaaacatgtaagatgacaagctttcccacgtagttgaaactttctttcactgaaagtcccagaaattgctgtgtcttgagcaaaccaggatggccaccctgccagtgtcttctgtctctgacccctagcattctctttggaacagtacgaacaatagtagctatctcctagggctgtagagactcagctgtgaaggccgagacctttttatgccatgctatgataggagaaatcatgtaggtgacacgtgctagcactgtggggacacactggaactagcgtgtggaactttcaagagggaaagtcaaagccgtaagctactaagtgggcagacgcagttgctgctcggtaaattctggaatgcaatcataaaatgtaggccaccttgttaacggaacagaagcaagcagcggccgccagtccgtgtgtggctgtagctgacacacagtccccttcagacgttgcagtttattagaagaaagggcctcaaggccatgactcagtaagagaaggagcatcaggcccaatctctgaacaaatctcaagaacaaaggaaaaaattaaaaatgggggggacgggacgactatgtcaggaagcttcacactgagggatttaacgttcaatgtagcacgcatgatacagagcgctcaagtctctgtggcctgcttcttagttctctgtgggcggtggggtgggcctagttctctgagtggaggtgcaacctgatctcttcgccttgtggaatgcagccatttaaaagtaaggatcatcttttaggaggaagcgggcgttcctagcgtactctactctcttttttgtttgtttgttttatttggtcgggttttaggggtttgggggatggaggggtaaattaagctgggctgaacttatgatcatcctgcctcgtctcttacgtgctgaaattacagatttatgccaccataacccagcaagccctcttatttatgactgaagttaaattagcaactcaacccatagaggtttaacaactaacacaaggatatgagtcaggttggtgatgggctaagaataaaatctgtatctttgatatctttggaaccactgtgattaaagactttgttttttaaaaaacaaaacaaacaaacaaaaaaaccctctaatgtcattgtatgcaagcaacagaatggggagaagattttaatataaagcttatagctttaaaaattctagaaagagcagagcaagctgacccctgtctgtgtgtcttgttgccctggacaggtctgatcatgtctgtcctcacagttgtcatcttgattctgtactttgtggttgacaatttcgtgatccagcgccgagaatggcttcctgagtgcactcctgtctatatccagtattttgtcaagttcttcatcatcggagtcactgtattggtagtggctgtgccagaggggctgccactggctgtcaccatctcactagcctactctgtaaaggtaagcctggaaaaatgctgctccttcgggacagagacggaaagggaggggaccttataccgttcgactgaaggataaactcttctgccctttagacactttagagagtcccccatgaacagaaatccttagctctggaaaaatagccatttccgttggttgtttaaatagctgagtcaaatcttcaagtaatggtgcagtgcatctttgtgcaggactagaactcaagtgaaaaaatgtggactaggacttagccttcggcctgcgcctgtgggaaccccgttggtcctctttcaactcctttctctttcctttggtagaaaatgatgaaggacaacaacttggtacggcacttggatgcttgtgagacaatgggcaatgccacagccatttgctccgataagacaggcacactgaccatgaaccgcatgaccgtggtgcaagcttacatcgggggcactcactaccgccagatcccacagcccgacgtcttcccacccaaggttctggagctcatcgtcaatggcatctctatcaactgtgcttacacgtctaagattcaggtaagctttgccatccatcgcctgggtgcccagcatgggtgacggagaagcaatactcaactctgccagaaacaaatcttctgttccacttacttttctatggctgtgctcgtacaccatgaccaaagcaacttatagaagaaggtgtttaggggctggcgagatggctcagtgggtaagagcacccggctgctcttccgaaggtccagagttcaaatcccagcaaccacatggtggctcacaaccatcccttacgagatctgactccctcttctggagtgtctgaagacagctacagtgtacttacatataatcaataaataaatctttaaaaaaaaaaaaaaaaaagaagaaggtgtttagtggagggcttacagtttccgagggttagaactcaatgactatcatgacgggaaacgtggcagcaggcaggcaagcatagcgctggagcagttgctgagggctcacagctccatccacaagcaagaggcagagagcacactggggaggacatgagtgtgtttgagacctcaaagaccccccaacacccattgacatacctactccaactagggcttacccccaatccttcccaaacagttctgccaactgaggacctagtattcaaatatatgagcgtgtgggggccatgcaggctcaacccaccataccctctatcattcatcgtctgagctgccatcctgcattctgtttcctgttcctgactgaacatgttcggggtaaacatatggcagtgtctacagcagagttgcacttacccagatttaattattcatttcccagaaccagggaattctttagaatatgacttccaggacatgagacacctcattaccatagagtagctgtaaggtcccaagacctgtttgactgtgagacaatgtcacctttgaaagaacagcaaatggtgcctcccctgtgggcactggtatacctaccgagttgacctgcccaagtcttctctctggtccagagctctcacccattaattctannnnnnnnnnnnnnnnnnnnnnnnnnnnnnnnnnnnnnnnnnnngtttctgtttttcttttctctcttagcctccagaaaaggagggaggcctaccccgacaagtaggcaacaagacagagtgtgggctgctgggctttgtcacagacctgaagcaggactaccaagcagttcgcaatgaggtgcctgaggagaagctctttaaggtgtacaccttcaactcagtgcgcaagtccatgagcactgtcatcaggaagccggaagggggcttccgcatgttcagcaagggcgcctctgagataatgctgcgcaggtgagcccccttcctcccgttttcccctttgagatccccatcccctcccaagaatgtctgagggacgatgccaaagcaggctgaaggatgagtgaccctgcagcccggtagtgacatctgagcttttactcaggacaatcattgcttttaggaactttgctgactcctttaataaaccctcacacctcggcaaggtggtgacccattttgacccgttttacagatgggaaataaacacagtgaacttgcacaatgttctcagagagagagcagctaacagtgccacagtcaggattcagcctggaccagcctgactctcccatttcctagtgagttcacagaggtagtcaggatatgccccatgccaccatgctcaaaggagctggtgagcatacgataaccatgtgcctctctccccaggtgtgatcgaatcctgaacaaggaaggagaaatcaaatcgttcagaagtaaggaccgagataatatggtacgcaatgtcattgagcccatggccagtgaagggctccggactatctgcttagcttaccgagattttgatggcacagagccctcgtgggacattgagggtgaaatcctcacttcgctgatctgcattgcagtggtgggcattgaggatcctgtgcgcccggaggtaaggcctgcccgttttttgaagtgaagagaaagggccagaaagcaggagcgcttgtctctccgctgaccactgcttagggtccagggtccagtgtaaaccacacgagccacctcggggggtcacaggaagcaggtgtgaatttctggcctagccacgaccccagacacgttgcctaactacttgtcacttacagagacagacgactctccaatacctcctttccacatcagccgtggagtgccaagtcagtagaagacatcatccctagggtttatggtatccaaggggcaggcagtgacaattttgttgggcttattacttggtaagtaggaatagtcaggggcagaattaaccagaagacaacttactcttcagctaccttctttcaaccgacatattctttcctgagcagtccctgtgtgcagaacactattctgggtgccaggggaatttcaaaagctagaatggtgagggtgtcctgtcatttcagtgagctcatgggtgggagcctggaccacatgggcagagagtggatagagctgcttctggggaggagatgagcggccacatcaccaggcgctgcccacacctcccagggaccctgaagaagaaggagacacgtctgcctcccaaagcaaattccccttcaacctaggagatcatgagtgaaatgtaaatgtcctctgtgagctgaacatattagcaaggggacactgagcactataaagaacaatcagagagagcccctgttctgtctccactggagcgagagctgagccagagccatagatcaccaagctcacagccaggtttccttttcttctttactccccttaggtaccagatgcaattgccaaatgcaaacgggctggcattactgtgaggatggtgacaggtgataatgtcaacacagcccgggccattgccaccaaatgtggcattctgactcctaaagatgacttcttgtgcctggaaggcaaagaattcaacagtcttatccgaaatgagaagggtgaggtgagttggtggagggagcagggaggggagggcacgactttcaagggcatgaagagctaggtctagtgtgcagcatctggggcttgcaggagcacatggctggcttctaaaggaaaatcaatccatcatgagacatcccttccccccacagctgctcgtacagtgagcagggtgtcctcttatctttgttcagtttgtctctatgggagacagaatcactaacttcattatctctctgtttctttaactcaaagaataatttttttagccgggcagtggtggcgcatgcctttaattctagcacttgggaggcagaggcaggcggatttctgagttcgaggccagcctggtctacagagtgagttccaggacagccaaggctacacagagaaaccctgtctccaaaaaaaaaaaaaaaaaaaaaaaaaaaaaaaatctttgtgtgctgctttcccctacctcacccctccaatgtcacctccctactatggctgtaggtgatacaggcttgtggttgaatgcagtatttgaagataaaatagacgaatttttcctgatctgcatggactcagacctaagcccccagcagctctgtggtagcctcctgagccaggggttaacttgaccctcctcctgtaaagagactaagaaataagaatgggcttccatatagaaaattgagagggaaaagaagataaagccctgcttagtcaccatcagtgaagccatactgactttttcatctccctggaggccagaggataagggtccctccatggctataaatttccagtactcttggaagctggggtcatgtggaggggtaagattttcctgaataagctgctctgagtctgactgatagaggtgcctctggtattggcaggttgaacaagaaaagctggacaagatctggcccaagcttcgggtactggcacgatcttctcccacagacaagcacacattggtgaaaggtgaggtccgtctgtatatagcctgccagaaaggagggaagaccagggtaaagtcagataaagagccatccttggccaacctggagatgtagtcagtggcagagtgcttgcttagtatacacaaggccctgagttcaagtcccagcactgctctcaaagaggaagaagaggaggaggagaagaagaaggaagaggaagaggggggggaagaaggaagggggaggaagaggaaggaagaggaagagggaggaaggggannnnnnnnnnnnnnnnnnnnnnnnnnnnnnnnnnnnnnnnnnnnnggaggaggaaggggagggagggggaaaggaggaagagaaaagacatacccattgaagagttaagcctgatgacatacacctgtgatcctagaatttaagaggtaaaggcagaaggacccaaaattcaaggtcatcttcaacaacatagtgagttcaaggcctgcctagctatgtgggaccttgtctcaaaatgaaatgagccatcagccaaactactttcctgtccccagtaaggagtcttaggagtgagtggtcccaggctagtggggacaacattgagtttggcaaacatctgagcccctggcaagtttgtgatagagttgagctttttggcttgcagtttagtagggtttgggagttttttagttgttgtttgctgggaagaggagctagtacagttctcatgtagcccagattgacctcagatcccctatatagctgaagatgtccttgaactcctgatcctcctgcctttacttcccaagtactaggactaatgggtaggccatcacagctatctagagctgacagtaggagtgttagtccctagctggtaaggctgaagtggtttccttgaactcagatgtctgaagtggtatccttgaactcagatgtcaaagccatctcatgctttcccagctacctagcaactgtgtaaggcacaagaccaaggctacctttctcggttcagagtgaactcagcgaatcaattgcctgtgggtggttactgtcgacccagcagcaaaaagacaaaggaaggtgagagagtagaggcagaatagtagagacaggggagaagacccaaggtgtcccttttgggaaaagcagtacttaccacatgtcttcaggtggcacgcgtgtgttcactgtcgtgtgtgtctgtttttcccaggtatcattgacagcactgctggggaacagcggcaggtagtggctgtcaccggtgatggaacaaatgatggacctgctctgaagaaagcagatgtcgggtttgctatggtaagctccccttgggtcaccttctccatcaggagccaagtgtctgcttccgatgccttcgaatcctgcctgtgctcctccacctgcacccacccccccacctctgtctcctaccgacctggccagtagtgtgtgtgaaaaccagacgatggttgttcagggaatcacagagtggcttacctggaaaaacaagagcactgtggtgacactgtttgcctggatgaatgacggaaaagtcagcttccacagagaatatggtccgcgccatgctcctcgagtgggaggtcacgagtatctgagtcttttagcaagttcctttaaaagtcaaatattccaaagacacaccttgcttcttcagtaaggtggggtaggcactagaagcattggggggcctggtttggttgggtttggtttaaggcttttgctggtggtggtggaggtttgatggttgttgcaagcacagcagcggattctggagcttcagaatacaaagcccaccctcacactgaaggcgcttattgctcccaggcctccagccacagctaactgttgtcggaatctaagcagtggaagggaatttaggaaggggtgtgtgtgtgtgtgtgtgtgtgtgtgtgtgtgtgtgtgtgtgacacagagagagagagagagagagagagagagagagagagagagagagagagaggagagagagaggagagattggagatgcacacctgtaatcccaacatttgggaggttgaggcaggaagatcttgggtttaagaccagcctgtcccacaagcagttccagaccagcttggatacacagcaagactctatctcaaaaacgaagaaaataacctatctttgtggagctctttttttttaaagggggttggttatagtgtttttgtaataacgtgtatatttatgaatctgtttatgaatatatgcacaagaatgtggatacccatgaaggccagatacagttgtgagctacaacatggctgctaggtatcaaattcagatcctctagaagggcagcgcgtgttcttaaccacccagccatttctccagtgcctagggaactctaaaaccaaccaaccaaccaaaaccagttttaattctaagaaactttaaaaatatgcttaagaagttagaattatataatggatctttctctctctctctctctctttgctgagtaagtaccgccaccagcctcccctatccaactgaattattttctaatcaatctaagtcattttgtcatttgtattcatagaatttttgattatttctctaaataatatatatcaacaaaacatgtgtaaattattacagaatttctcataaaataaaatctggcaattccagccagtcggtggtggttgcacacctttaatcccagctctctcaggatacagaggcagtcaaatatctgagtttgaggtcagaatccaaataggattcacaccttatggatgtctgagttatctctggagtccgactccacagcagcggctcttaaagtgtgtcctgtgtggacatggagagacagttcagtgttaaagagcactgtctactctaacagagggtgaaggttcagtttccagcacacacaaagcaactcacaagcatctataactccagtcccaggtgatctgactccctttgctggcaggcaccatgcacacatagggtatgtatacacctatgcaagcaaaacaccatacacataaaatgaatttaaaaaaaaaatgtacctcaactcccagtgcacctgcactacctggaaacctatggaaatgcagacgctcgggcaccactcgaggctcctggaccagaagacctggagtttagggtcctaatgtgcccaaatgtttaagaaagcgctgatttttatattagcctatgtcccaaagactgtgatcatattcacaaatttactaggaggacacaatggagcctggtctaagcactgtatacacatggctggcgtttgttacagacgtgtgttgaggatacagttagatcacaagaaaaaaagacactggcagaattccagaagaatccatgtccagcctccttgtgctctcactgctccaggggagtctcttcttctatatttgcaccaggtcagcagtgtgtacaatgcctctaactgggaatcccatcacactcggctcacaaagctgttgtcaatactggcctttgggggaactttctgtcacataccagaattccagactcccaaaagggaagtagaagccaaactatttcagcatagtctaccaagtgtgtcaaagctacagtctatgggctgcatgcagccaaggatagctatgagtgaggcccaacacaaaattgtaaaatgtactctaaactctaaataccattagttttttgtgtgtgggggggtggtggtgtatatgggtttgttgttgttgttgttgtaactccaatacatccttatttttgagtgtgaatgtcaaggtgacagattgttacagtgtcaaaaggctggacacacttggtgaagtgagccaccctgtctcagttaattgcagaccagtagtgctctgagaaactagttcccagtagccagccttgcaagtgggcctttctaaggatggcagcctgaaggccactgtgctgcgggtttgcacactttccttccacttttgtcctggctatttcatgttgaaggagctgggtttaccgtcttcacagactactgtcccaacacagatgaacaacacgaatgtatgtgttcattgtatttttgtagtctcctttaaggtgttaaagtattatctagtctcctggatattgttggatcgtttggttttgatttggggtggggttttgtggttttgtttttgtttgcatcttcccctacacctcnnnnnnnnnnnnnnnnnnnntgtgtgtgtgtgtgtgtgtgtgtgtgtgtgtggtgtgtgtggtgtgtgtgtgtgtgtgtgtgtgtgtgtgtgtgtgtgtgtgtttgtgtgtatctgtgtacccaccaaggtatgggagtggaggtcagaaaacaacttttagaaattggttttctccttccactgtgtaatactatgatcctagaagcaaactcaagtcgatcagtctgcacgccaaatgcttcctgtgagacaaggtctcactctgtatctgactggcccgaaactagctatacagaccaagcctgcctctccctcaagtgctgggatgaaaggtgtcctgtacccccatctggtgtgttttatctgttgtttgtttcattttgttctgttttgatgcttcatttggattttgtgacatgatctggccttccactcagcctgcagcccaggttaccctcaaacttgaggcagtcatcctgcctcggactccttagtgttggagtcacagtggacaccactgtgcctggtttgtcccttgggtctttatacattagttctagaagcaatcagattctatatctcactgggggttgggaagtgacccggttttatttctttattaacttgattactgacacaaaaagagatttcccttcacttggccctctctgtgcttcagtccccacatgaaagtcaggttaaatgcccgactcgtctccttccatacagagggtaacttgctttacgttattttttaggtattattacaagcacatgttttttgttttttgtttttgtttttgtttttttcagttctgggattgagcctagggcctcaagcatgtcagacaagaactctgaggtacctacagcccaaatggggaaaattgaatatagatacgatatgcttcaatccattactcttattattgtcttgatgctgaaaccgatccctcattagccaggagtcaccccttcagtgtctctgagagcttttgatgtaaccccaggtgtcttttattgctttttttggtttcttgcctgataagacactgcagagaggttgagccttgttgttggtagtggtggtggtgttttgttttgttttgttttgttttgttttgttgagacatgttctctgtgtatagccttggctggctgtcctggaactctctatagaccatgctggcctcagactcagaaatctacctgtctctgcttcccgggttgctgggattaaaggcatgtgccgccaccaccacctggctgagcctatttctttctttctttttttttttttaaagatttatttatttattatatgtaagtacactgtagctgtcttcagacactccagaagagggagtcagatctcgttatggatggttgtgagccaccatgtggttgctgggatttgaactcctgaccttcggaagagcagtcgggtgctcttacccactgagccatctcaccagcccgctgagcctatttcttatttccggtctggtatcatgcattgcctcagtgtgccctgcctcactaggccacactagggaatacagtcagagcagagaggagcatctcccctctgagcgcataccgtgtcagatgctactgagtggataacagagctaagaagtgagcttttgtggcctggctgagtttctctacctgtttttaaggtgaaatgcttcctaaattggttgtcttcatgtttctcgcttaaaattctggaatgctatgcttctaattctctcctgtgtgtctagcttccctaattttatatttgcagttcttgagataaaacctgtgacctctaatgccgttagtgcaatttttgactttgtctaaaaactatgcaatagttataaaataacaacaataatgaaataattactaaaaatattctcttattttattttgagatagcatctcactaggaacctaggttggcctcaaccttactatgtagcccaggaaagccttaaactcacagtccttagcttcctgagtcctgaaatcatatgcatgtaccaccacacagagttaaatatttatcttttttaaattagttattattgtttggtgattctgtacatgtacatatacgtattactcttattgttttttatctgtagctatatcttacatcaaattactaaaaccacataattttaaattaaaaaatagaggctggaaaaatgtttagagacttgggctacttttcctgaggaccaaggttctattcccagcacccacttggtggctcacagctgcctgtgactctatttccatgggatctaatggcctcttctggcttctgggagcagcaagcctgctcttggtgcacagacatacttgcaggtgaaacacccatgcacatagaatgaaatcatttaactttttaaattaaaggtaagggctgagccagacagtggtggtgcagtgcctttaattccagcagtcaggaggcagaggcaggtggatgtctgtgagttcgaggccagcctcttgtctacagagtgagttccaggacagccagggctacacagagaaaccctgtctcaaaaaccaagaaacaaaagcaaacataaataaatagaaaacaatcacataggagccagagagatggcttagcagctaagagcactggccgctggtccagaggacccaggcttgggttccagcgcccaatgtgacagtaacaaccgtccatacctccagttccaggggccctaatgcccgctcctggtctccacaggtgcctggtgcacagacatgcaggcaaagcacccatacacacaaaataaaaacaaatcttttttgttagtataatatatgataatatatgatatataatatacgtactccttcctcctaggttaatggtaggtaacgtctgtatgttctttcccagctctcttctgttcagttaacagtgaagcctgaagattatgtcatagtagtgagcagacccaagcacatctctcgtcttgtttcttttcacagtgcacagatgctgcacagatgctgcacagatgacggcagcatgtggctttattgaagtttgggggaaggggcaggatcgcctagcctaacctcctgcctcggtattatagacaagctaccatgccctgcgctgtggaacattttaatttttgttttgttctggtttggttttgtttttttttcaagacagggtttctctctgtagccctggctgtcctggaactcactctgtagaccaggctggcctcgaactcacagacatccacctgcctctgcctcctgactgctggaattaaaggcactgcaccatcaccacccggcggaactttttgataggaaaactgcattatgtacttgtaatctagatagtcttcatttgcttcaatctagatagtaaaataatattactaggcaaacagaataatatactacacaccagaataaagaagaagtctcctggggctagagagatggttccacagttaagagcaattgctgctcttacggaggacctgagttcagtttgctgcacttaccttgaatggctcacgcctgcctataattccttattcagaggatccagtaccctactctagcctctgcgggtacctgtacacatgggcacgtatgcatcaagactcataaataaacatctaaaaagtttaaagactttacaggaataataagccccagtgggttagaggttgcacaatgtataatagaaacagatcagggctgtatatggtgatgtgcaccagcacttgggaagtagagacaggaaaatcaggaatctgaggccagccttggccacctagtgagttggccttgcaagagactctgagaggggctagaggatgccgtcccatctcttgatcacttatagtctttcctgcagagtggcagggaagcaaggtggggagggtggttgttttctgttgtagcttcaatgccctccatgcctgcacctggttctgaggcttccgggttcttaggccctgggttcagattgtgctgcgtgcccttaactgcttcccgcctgccttcctctccaccccagggcatcgcaggcacagatgtggctaaggaggcgtcagacatcatcctgaccgatgacaacttcaccagcattgtgaaggcagtgatgtggggacggaatgtgtatgacagcatttccaagttcctacagttccagctcactgtcaatgtggtggccgtgattgtggctttcactggagcctgcatcactcaggttgggtggggcttggacagcagagtggctcgaggctgttctcaggggaggggagggggaatagcgtatctactcaggagtcaagacaagggtttcccagtgctgctcagacagatatctctaccaggtttagtctctacctgcttgctgagcatggagatatatacccagcattagtttagctttttttttttttttttttttttttggtcagcaactatgaagcgcgcttatgtggattaactttgtcttttcaaagcaagcttgcaagtcagatgttatgatcccaaattcaaggtctagtgggtagtgggagctaggccaagtcaacagaaggatgtcactggaaagtgatgcaggcttgatttctggaacaagctgaaagacctggttcttcttcttcctaccaggattccccactgaaagcggtgcagatgttgtgggttaacctgattatggacacgtttgcttccctggccctggccacagagccccccaccgagtctctgttgaggcggcgcccctatgggcgaaacaagcctctgatctcccgcactatgatgaagaacatcttgggccatgctgtgtatcagctcctaatcgtcttcctcctcgtctttgctggtgagccacagctggaaaagggaaggcagctattgggtgctagatttagttaggcacagagaatggttgagaagagacaggagcatagtagctggtgaagtacagacatataggcacactagcagctttgccagtgagtgctgcctgtgtggtctcagcacatagacatggtgcacatagctttccatcatgccacaccacaggggaacaaacgggactgatgccagctgacagacaaaaaccagagaagttgagacgagagccaacatttaaaagatcccattgagtggggctggagaaacaagtctgcaattaaaagcacttgttgctcttgcagaggacccaggatcagctctcagcacccacgtggtggttcacaaccatctgtaaatccagccccaggggatctgatgtccccttctgacctccagcagaatgggcatacatgcaggcaaaacactcatacacataaaacaaaacaaaacaaaacaaaaaagaatctacaataatctttaactgttttattttttaaaaaacaaacaagcaaaaaacaaaacgttcaataactgatataactcagaaatggcccagttagagtggtctttgtaatggccataagcggtcaggacggctattctgtctcaacctgaaccctcactgagaccacagtcatcctctaataattgccctgccctaccaggcgacacactgttcgacattgacagtgggaggaaggcacctctcaattcgccacccagccagcactacaccattgttttcaacacgtttgtgctgatgcaactcttcaacgaaatcaacgctcggaagatccacggtgagaagaacgtgtttgcaggcgtctaccgcaacatcattttctgcactgtagttttgggcacattcttctgccaggtaagattctgtctgggcttgggataggggtgctgggagacagagggcaggagcttgggagctaggactctctctaggtgcccaagattaggagagggagttacgaggaccaaggctaagagtaaacaccttgggggtctcagttggctttcctgggtacctcgtttttagaactgagcccactcaggtgctccaaggcaagggagcatgtcccctgcaagtatgacttagagaattctttcatgacctttctaaatgtgcagaagttccatatagtgaccaagagaagagtcactatctcctacctccttcccatgccagcacagatgaaatggcgtgtgtatagtagtgtagtagtgtataggtagtgtaggctcccagtccccaccctggcccttttgttctgagtgagtttctgattggaaatgctgcacgattcacagaggagtgatgggttggtacgtacacagctgctgggataaccctgcctgggctcctggtatgaaaacgaggatcaagagcacagttgcctggtagtgggaagatggggtccttccttcttgtgccagttccgactagtgaacctagttagaggttcactaagatacttgtctacaaaggattatgggaaggccacacaaccgaagaacatcttcttggagctggagacagcaacagttaagagggggccagagtttaaattccagcactcggtatcacttgactcctgatcacctgtaatgctacctccagaggatctgacactctcttctgtcttctgtggtacatggattaggttacagacccacacgttgacacacacatgcctcgcacgcgctcgcacacacacacacacacacacacatgttcctcttctgcatgccttctctctgtcacacactagcctacatcacaggaagcctccaactttctctgttcctgccagaccgtatattaatcgctgtcatgatactcatagccatccatcacatgattcccatttgaagtgttctatgaagattgtatctgtagcccttctccacgtctgcacttctttcctgttccacaagaacattaggacttgtgccccaagagccctgcagggggcgctgtggccctagccaccccggaggtcttggcctccccgtggcaggccgtgctttgctgtgtttcagatcatgattgttgaactgggagggaagcccttcagctgcacaagcctgaccatggagcagtggatgtggtgtctctttatagggattggagaacttttgtggggtcaggtgagtgtggggtgccctctacagatccctaaagctgcagaccccagctccttgtttcacctgacccaaccttcccccttccctccatcacagtttcaagttccttctgtcttggggtgccaggctggagtaaccattgccttcacttcagaacttaggttctctgtcccccattcttagagactgaaaaaaaaaaagcgttttgaaacaaaagtggaaattttccattaaaaaataaacctaaggatctttaaaaaaaaaaaaaggcaaaagcaaaacgcaaaaagcaaacgtcgtgctgacgatgccacagtctgacccagggctactccactgccgtggtgctgctgtagttcagagctttcccgcctcttctctgcttcacggtggctggttgaatgcccagctcccacttgagataaatcagtcctacagatgctccagagaggagggtgacactcggatcagcacagcctctggaagccgctggggctggaatcacccttcttctcttcacaaactttagtagccatgggcaagttccttagccagtccatttattagggatctccacataggataacagagtgatcattacttgttgttaactagtgaacgattattgaaccaaaaacatgacaatacctgttataagtactcagtgagtgttaatactaattgcgacaatgtcatcgtagctttgagtttcatccttcccttaataccatgcttagttctggcctggactgttctccgcagatctcaagtctatactgagaatcccctagtgccgcttcccaagctaaaagcgggattaaggaagggatgaaagtcagcttagctaattgtgttccaattcgtgtctcagtccctccaccccacatgtacaacgcatttctctcccagctcgatttgcccttggccccatcttcctgatgtgtgcctgctttatagctctgttcagttgtcttaaaaaagacaaagatcccactgggaaggaagagtcaagacggagacagagtgtgagtgtaatgaagtggctgggagattacaggaatcaagtccccttctgtgtgtccacaaatgctggcaccttcccaagtgcaatcaactggaacaatgggttcatctcctgggcagcttagtgcttcttggtgcttctcaggtgggaaaggcttgaggcttaggagcctcccaagggcctggctcaggccagctaacatcttttcttctccaatgtggctgttgtcccctttggctgtgactgctctcaggtcatctctgcaatacctaccaagtctctgaagttcctgaaggaggctggccacggcagtgacaaagaggacatcagcagggatactgagggaatggacgagattgaccttgccgagatggagcttcgccgaggccagatcctctgggtccgtggcctgaaccggattcagactcaggtactctgtggtggcctgtccttaccctgggagaagaagtctccccatcctgggaaagggtaggaaggcagtaattcctggcagtcaacacctttacccctttcgtaaggctcactgttcaagcgcagcctgtgttccttaacttcagggccaacagggccagaggtctctgggggattcctctaggagggactagtcggcagactggaccatgggccaacagactggaccacggtccccgagttcctcagctgtggttagcccttcaacccatcgccacccccaccccaggtttgtcagtggagatgtcttcccacataaggtctattccagtaccagccacgaccccaagatagggactgtgtagtcccttccctgccctgatggaagaactaagaggccctgattttataacactggaaggaaagccagcatccctgactggtcgaagtgagagctgttatctggggaggtctttgttaaagaagctcaccttcttccattgttccaccttgatgcaaggcctctctggggcatctgatgattaagtagctataaacagcagtctctctgtgcctgatatctttggaagaattcagactggcttcccaaaaagggaatttctgaaacagagtacaagtgagtcccctgcttgtagccctaaccccatttcccccgacttccatgcatcgctactgggacagcttcggagacccctcaaccttttatggttttagtcccaagattcccaaacaaaccgtcaattccaagatcttgaggggactgtcctgagcaagacctgtttcttccccctagttggcgagagatcaaaatatttcactttcaaaaactggcctttggctggtttagaaaattgcctggccagcctccccctcccccatcccctttagtgtacagggaagacaagctaattcacattttaaactgcttacctggtaggaactgcctcccacccacccccaaccccccaggaagacaccaggtagaaaatgggcaagatacaggtcgtaaaccctgggctcctctcctctttttcctaggaagggaactgaatcctgacttacatatatcacctcatgatagcaagtccccacctctgcccacccccacccccacccccaatgagtcccttgggtgcccgtagaatttagcaccttgacttccatctcttcaggtctgctcctttcaaaataacctctttgcttttcttcccttcagggtcctcttctactgtgtgtttgctttttttttttttttaatatttatttatttattttggttttgtccctgtttttttcctggccaggatcccctccttccagagcctccttgcttcttgccagtcttctttctggggagctgagattcatggctcttccttttcctgcactcccagtttgcatcccctttccgtacctctccgatctccacagcacacataccttcaggcatacctctttccctgctagaatggaagggagctgggccagattgactttaaaacctaaatctgaggccaaccatgtggtgcacatctaacaatcttcaggaggctgaggtgggaagattcctagttaggccagtctgggctgtgtagctagaccctacctcaaaaaaaaaaaaaaaaaaaacaagcaaaagcctaaacagcctccaacagcagcctattgaagatgccgctgataggatccatccacaacattgtaactggcacctaactgagcaaatgagactgagtgtgctaactgcatcttccatgtccaaagccctcccacccccatcaggagggattttgttcagtctcaggaggattccaacaaaagcccttacagtctggctgctggtccccaattgcaacacgtggggtgggagatgttgccaagtgactgcccagtgctggctgggatttcccccttcccctggctctaggcatttcctcccttcacctttaccctttagtttgggggaggaaaaagcactagaaagcaaacatttgaagaattaaagggctggactcttagaacagtaaactcagaatgcagttttcattatgtaagttggaccctgtaacactctaagctcctaggaaggagcctctaccttcttaatgggactgaaatccgccccctaagggcagccctcacctcctacagcctcagccagcaggccactgtgtggggaagcatttttagctcatacttggtctccacccctaagtatttcatggcttctccagaggctctgtttacaagaacaggagtctgactcaggagaaaccttccttctggggatgcagtcacagaatcccaatcgatctctgaaagataaaggaatccctttctatttgctccttattgcttaggagtcaaggagaagggtggtagattgattaagaccccagatcattgcttactgcgggaaagcgatgatattaattgcctccatccctaagaaggagaaagcggaaagccagaaggctgctgtggtaggcgggtgggggagagtggcagcagcggcagcctcccagcgtcgccagcaccagtctgccagtgaaggtctccagtgcttaagtcatgagtgagtttcagaattgtgcgtcatgtaccagcagaatcctaagcaccactgcagctggaggaagcgtcaaaaaagacacctcctccaaaccaagccactcaacctggcagtcttttcaccaaggccacttgtgtggactgctatactgcccatcttctttacacacgtgttaacttcctgggaaatttgcaaaaacaaacaaacaaacaaacaattagttgacttagttggtgtagaggctcttgggtcttacatttcactaatatgtacttagtttctggtatgtcaaattgcatgccttatttttaatagtacaggtcaacataatgaaaaagctacctgttaccattggggagaagttcttttgtgcctgtccatcctaggctacaggggaaaaggaaacccaatcctagctgggtgtttgaaaatccatagcaaattgttccttaaatgacaatgacagtgtggtttgcaattactgccctcccccgccccaccctcacctgttgctctgggtttaagggaatagctctcttgatctcctacccctctccccagccctcctgaccctgccttcctcttccttctctctgactgtggagcaaagctgtctcactctctgattctttgcagattgacgtaattaacaaattccagacggaagcccccttaaagagagtccgagagaacatgactcaacaccttgatgtaaaactggttcctagctcctattccgcagcagttgcatcactcagaacttgcccctccatctcttctgccatctcttctgcagttacatctcctcctgtgggcagtgagtgagagtatgttacaatgcatgatttactaaagcgaccacaagagagcacgtggcatccactttaaccaaccatggttactagtgcttttcgggtcccccacccacccctttgatcttttgacttaagggaagaaaagaaaaaaaaattctaccctaccccagctaaaaccaggctggataccctggtttcattttattgtttttttttttaatgttggaaagttattaaccttaactattttaaagacgataaccctgttttctgattgttcctctgcattgctcgctgcttnnnnnnnnnnnnnnnnnnnnnnnnnnnnnnnnnnnnnnnnnnnnnnnnnnnnnnnnnnnnnnnnnnnnnnnnnnnnnnnnnnnnnnnnnnnnnnnnnnnnnnnnnnnnnnnnnnnnnnnnnnnnnnnnnnnnnnnnnnnnnnnnnnnnnnnnnnnnnnnnnnnnnnnnnnnnnnnnnnnnnnnnnnnnnnnnnnnnnnnnnnnnnnnnnnnnnnnnnnnnnnnnnnnnnnnnnnnnnnnnnnnnnnnnnnnnnnnnnnnnnnnnnnnnnnnnnnnnnnnnnnnnnnnnnnnnnnnnnnnnnnnnnnnnnnnnnnnnnnnnnnnnnnnnnnnnnnnnnnnnnnnnnnnnnnnnnnnnnnnnnnnnnnnnnnnnnnnnnnnnnnnnnnnnnnnnnnnnnnnnnnnnnnnnnnnnnnnnnnnnnnnnnnnnnnnnnnnnnnnnnnnnnnnnnnnnnnnnnnnnnnnnnnnnnnnnnnnnnnnnnnnnnnnnnnnnnnnnnnnnnnnnnnnnnnnnnnnnnnnnnnnnnnnnnnnnnnnnnnnnnnnnnnnnnnnnnnnnnnnnnnnnnnnnnnnnnnnnnnnnnnnnnnnnnnnnnnnnnnnnnnnnnnnnnnnnnnnnnnnnnnnnnnnnnnnnnnnnnnnnnnnnnnnnnnnnnnnnnnnnnnnnnnnnnnnnnnnnnnnnnnnnnnnnnnnnnnnnnnnacacttgctactgccttcctgtttctggtctatttaccttcccagaacgggaggcagaggggagacagtcagcacggtttccagtgagggaatgtcctctgtcatcacacatgttacatacttgagtgtcccatccatcccttcccacaaccagccctgagttgccagtggcctgtgatcacatgactgcccaagcttcaatttgtttttgccttttatccacccataaaagttctggtaagagttttgagttgagggtggggtcaaagtgatacctgctgtttcttgaggcccaaaggcaggcctgaagacactaaaaagtcttaccctgcaaaaacctctccttctagtcctgccacattcctctactaatctcttctctctcttagttctgccctccctttcttttttttttttcgagacagggtttctctgtgtagccctagctgtcctggaactcactttgtagaccaggctggcctagaactcataaatccgcctgcccctgcctcccgagtgctgggattaaaggcgtgcgccaccacgcccagctcttgccctccctttctaagagtcttgctgaattgttcattcacatgtctctggtagaaagagctggctgtcctggggacttaatggcagaggacagagaccagtgggctcagaggaactggtaaaccacataccctgtgcccctaaaagtttagatcaaagaagaaatagaccacacctactttctccggcacgccccttccctggagaccccaggagttgcggttgtgtgtttaaccctctcacctgctttgccatcccagttttaaatgactccgactgtgcatccggatctccccaagttccctgaggcttccctctggaaggaagtcccatagctctctacccctagcctatgaaaggggagtggaaaagtacagtattcccatggggaaatggcaccttcatcagaccagctaagcttccaagtgtgctccacactcacctgctttgggttccctcccggtgaacccctttaatcagcccctcaggaaacatttcctggctaagcaggaagcaggtgatgcttttcccatgtctgctccagcagccctcctcatccccacatactgcttacacaccggattctgtgctccaggcccagatcacagtaagtaatatagtcactgtgtgactggctgtccggcagcacatgatctctgagccagtgttggagttgagcatctggcacaacccccaccactctgtgcctcacccttcccccacccctaggccaggtggtcctccccagtcccctgactccttgcttgggcctccttccaggtggctggttccccttagtgtctagaagtcctgaatctatgtggacaactgttcttgcctcccccaaaggtggccctattttcccaccggaccccccccctttctactttatctcctgtatttgtttgcctataagagggttgttaatcaccccaacaagagagaggacaagcccgcaaacatactccagacccttcaatcctaattttcaaaaatcaactcttttcataatgcacatataattgttgcaataaaatatccagttaaaaacaaacaaataaacaaacaaacaaaaaactagaagcaagaaggtttaaagctataaaggtccctgccatcctgtagaactccgaagaatgtagaaatggcaacatcaggtggcggtattcctatgtactaacctacagactttaatcctgtcccttggccggggcatctctaccagggttaagggagaagactgagtttcagctcacttagtctatcttgtcttgctcaaatatatcaagtataggttacagaaaacttgggaccacccaaagatttgagggagcttccattctgcctgatcttcttacccagatccgaacagaggcaacctgactggtgaaattcaccatcagacggccagtagaaccacggaaggatggaaagcaggccctcgctgctgttcctgaggttacatttcttatgtatgctgcagggttgagcttacagttgagtggcagagtctcttgccttccaagccctgaacactccagtcattgggtgggtctgtagctatagaggagagaggccagggagggaaaggcttagccagagaagagagagctacagctctgatggtgaggcttctgtaggcagtatctttgagggatctgtaaaattatgagaggacccaggacaggaaacccagctggtttatttggctgtttgtgtgcgctgctacctccacgttctcgcttcttccctagggatgtattttttgtttaaacagcagaggaattaaagagacactcttaccacccggcatccactcctcctccctaacaatttctttcgcatcaatcttgtttcttttccaaggaagaatgggtctgaaccagactaggattgaccacttccctcaatagaagacatcctagagccaccagctttccctggcctccacccctccccaacactgcatcccagtctaccaacccagattcaaagccacacttgagtgacacagttcggacatgtagaattagcaaagcaaagcagcaaacaacgaaaacacccaaggagcttatgcttaggattaagcaaaagctgcccccaggattcatcgcagtcagtcttccctagacccctgagccaccaagtcccttcttctatgcagtagaaaggaggctgaccaggcaacatatttgcccatttactcaggaacactgcaaagtgtctccgtcattcttttcaactgtcccagcagaaaagccactcatttgaagccagcctcctggatcaggttcctctcctggtaactctgtatcttcacactaggtcatgttcctcttcacaatatgcaggtggctgggcaaagcagcatgaaggtacactttgggtctgagcaacgttgctgtggattgggcgtgggtgtgcagttgaaggatgaacaccaggccttcctcagtagacagggaaaggcttcttttcatacctgggttttatctgcatcttctagggaaaggagaggcagccctcccttctgtgggggaggggacacagcagaggcggtgggatggaaagggatatgcatggcttctgaattacagttagggacttttaatttccctgcatgctgtggaatgaagattggcttgtctgcctgtgcacagtatccatggtcacttgtcactcagtgtttatcatgtgcagttttcatgaactttggctgttgaggggttgaaacagataacagagctgctgtgtgtaattttctcatcccacatgcacaagaagaggccagcctcaatacagaaagtcacctgtgtgaattgccttttaagttcttccattaatgtcaccttgttccaacatgctgtcctctatccagaagaactaaccaatcagtcccttggtttgtttcattttaagagtggattcttttggaatgctgtttgctttgtgctactttttggaatgtaacctttgagacatcctcaccgactgccatcagtcactccacgccctgtgcttgagatccgaggcgtgtgatggtttgggttgttgagccatcatgttttatagttgggggcgggagttgtttctcttctcaaaccactaattttttttgttgttgttctccatgccaattctcacctctcttctcttctcatcctctttctcattctcctggttatagatcagagtcgtcaaactgttccataataaccatgaagttgctcataaacccaagaatcgtagctccatccacaccttcatgacccaacctgaataccccgcagatgat

SEQ ID NO: 1777 - DNA, 3198 bp, Mus musculus
agccatgaaggggagtttggctgcaccttaatggacctgcgaaagctcatggagcttcgtggagctgatgcagtggcccagatcagtgcccactacggaggggtacaggaaatctgcactagactgaaaacctcccctatagaaggtctatctgggaaccctgcagatttggagaagcgtagacttgtttttggaaagaacgtgatacctccaaaaaggcccaagactttcttagaattagtgtgggaagccctgcaggatgtcacgctcatcatcctagagatcgcagccatcatctccctggtcctgtccttctaccgacctccgggtggagataatgaaatctgtggtcacattgcaagtagcccagaagaagaggaggaaggagaaactggctggattgagggggcggccattctcgcctcggtgatcattgtggtactcgtgacagccttcaatgactggagcaaagagaagcagttccgggggctgcagagtcgcatcgaactggagcaaaaattctccattatccggaatggtcagcttatccaactcccagtggctgagattgtggtgggagatattgcccagatcaaatacggtgacctgctgcctgcagatggaattctaatccagggaaatgatctgaagattgacgagagctctctgacaggagaatcagatcatgtcaagaagactctggacaaagaccccatgttgctctcggggactcacgtgatggaaggttctggacggatggtagtgactgctgtgggggtcaactcccagactggaatcatcttcaccctcttaggagctagtgaggaagaagatgatgatgacaagaagaagaaagtcaggggtctaaggaacattccaggaagagacagaagggcatcttgccttccacctgcctgccatccactgctatattcttgcctgctcacttgctctgtccgtgtgtctaccctagcaaagacccaggatggagtggccttggaaatccagccactcaacagccaagaggggctcgacagtgaggacaaggagaagaaaatagccaggatacccaagaaagagaagtcggtgctgcaaggcaaactcacacgcctggctgtgcagatcgggaaggcgggtctgatcatgtctgtcctcacagttgtcatcttgattctgtactttgtggttgacaatttcgtgatccagcgccgagaatggcttcctgagtgcactcctgtctatatccagtattttgtcaagttcttcatcatcggagtcactgtattggtagtggctgtgccagaggggctgccactggctgtcaccatctcactagcctactctgtaaagaaaatgatgaaggacaacaacttggtacggcacttggatgcttgtgagacaatgggcaatgccacagccatttgctccgataagacaggcacactgaccatgaaccgcatgaccgtggtgcaagcttacatcgggggcactcactaccgccagatcccacagcccgacgtcttcccacccaaggttctggagctcatcgtcaatggcatctctatcaactgtgcttacacgtctaagattcagcctccagaaaaggagggaggcctaccccgacaagtaggcaacaagacagagtgtgggctgctgggctttgtcacagacctgaagcaggactaccaagcagttcgcaatgaggtgcctgaggagaagctctttaaggtgtacaccttcaactcagtgcgcaagtccatgagcactgtcatcaggaagccggaagggggcttccgcatgttcagcaagggcgcctctgagataatgctgcgcaggtgtgatcgaatcctgaacaaggaaggagaaatcaaatcgttcagaagtaaggaccgagataatatggtacgcaatgtcattgagcccatggccagtgaagggctccggactatctgcttagcttaccgagattttgatggcacagagccctcgtgggacattgagggtgaaatcctcacttcgctgatctgcattgcagtggtgggcattgaggatcctgtgcgcccggaggtaccagatgcaattgccaaatgcaaacgggctggcattactgtgaggatggtgacaggtgataatgtcaacacagcccgggccattgccaccaaatgtggcattctgactcctaaagatgacttcttgtgcctggaaggcaaagaattcaacagtcttatccgaaatgagaagggtgaggttgaacaagaaaagctggacaagatctggcccaagcttcgggtactggcacgatcttctcccacagacaagcacacattggtgaaaggccctgggttcagattgtgctgcgtgcccttaactgcttcccgcctgccttcctctccaccccagggcatcgcaggcacagatgtggctaaggaggcgtcagacatcatcctgaccgatgacaacttcaccagcattgtgaaggcagtgatgtggggacggaatgtgtatgacagcatttccaagttcctacagttccagctcactgtcaatgtggtggccgtgattgtggctttcactggagcctgcatcactcaggattccccactgaaagcggtgcagatgttgtgggttaacctgattatggacacgtttgcttccctggccctggccacagagccccccaccgagtctctgttgaggcggcgcccctatgggcgaaacaagcctctgatctcccgcactatgatgaagaacatcttgggccatgctgtgtatcagctcctaatcgtcttcctcctcgtctttgctggcgacacactgttcgacattgacagtgggaggaaggcacctctcaattcgccacccagccagcactacaccattgttttcaacacgtttgtgctgatgcaactcttcaacgaaatcaacgctcggaagatccacggtgagaagaacgtgtttgcaggcgtctaccgcaacatcattttctgcactgtagttttgggcacattcttctgccagatcatgattgttgaactgggagggaagcccttcagctgcacaagcctgaccatggagcagtggatgtggtgtctctttatagggattggagaacttttgtggggtcaggtcatctctgcaatacctaccaagtctctgaagttcctgaaggaggctggccacggcagtgacaaagaggac

SEQ ID NO: 1778 - protein, 1058 aa, Mus musculus
SHEGEFGCTLMDLRKLMELRGADAVAQISAHYGGVQEICTRLKTSPIEGLSGNPADLEKRRLVFGKNVIPPKRPKTFLELVWEALQDVTLIIIAAIISLVLSFYRPPGGDNEICGHIASSPEEEEEGETGWIEGAAILASVIIVVLVTAFNDWSKEKQFRGLQSRIELEQKFSIIRNGQLIQLPVAEIVVGDIAQIKYGDLLPADGILIQGNDLKIDESSLTGESDHVKKTLDKDPMLLSGTHVMEGSGRMVVTAVGVNSQTGIIFTLLGASEEEDDDDKKKKVRGLRNIPGRDRRASCLPPACHPLKCLLTCSVRVSTLAKTQDGVEIQPLNSQEGLDSEDKEKKIARIPKKEKSVLQGKLTRLAVQIGKAGLIMSVLTVVILILYFVVDNFVIQRREWLPECTPVYIQYFVKFFIIGVTVLVVAVPEGLPLAVTISLAYSVKKMMKDNNLVRHLDACETMGNATAICSDKTGTLTMNRMTVVQAYIGGTHYRQIPQPDVFPPKVLELIVNGISINCAYTSKIQPPEKEGGLPRQVGNKTECGLLGFVTDLKQDYQAVRNEVPEEKLFKVYTFNSVRKSMSTVIRKPEGGFRMFSKGASEIMLRRCDRILNKEGEIKSFRSKDRDNMVRNVIEPMASEGLRTICLAYRDFDGTEPSWDIEGEILTSLICIAVVGIEDPVRPEVPDAIAKCKRAGITVRMVTGDNVNTARAIATKCGILTPKDDFLCLEGKEFNSLIRNEKGEVEQEKLDKIWPKLRVLARSSPTDKHTLVKGPGFRLCCVPLTASRLPSSPPQGIAGTDVAKEASDIILTDDNFTSIVKAVMWGRNVYDSISKFLQFQLTVNVVAVIVAFTGACITQDSPLKAVQMLWVNLIMDTFASLATEPPTESLLRRRPYGRNKPLISRTMMKNILGHAVYQLLIVFLLVFAGDTLFDIDSGRKAPLNSPPSQHYTIVFNTFVLMQLFNEINARKIHGEKNVFAGVYRNIIFCTVVLGTFFCQIMIVELGGKPFSCTSLTMEQWMWCLFIGIGELLWGQVISAIPTKSLKFLKEAGHGSDKED

SEQ ID NO: 1779 - DNA, 3216 bp, Mus musculus
atgacgaatccaccaggacaaagcgtgtcagccaacacagtggctgagagccatgaaggggagtttggctgcaccttaatggacctgcgaaagctcatggagcttcgtggagctgatgcagtggcccagatcagtgcccactacggaggggtacaggaaatctgcactagactgaaaacctcccctatagaaggtctatctgggaaccctgcagatttggagaagcgtagacttgtttttggaaagaacgtgatacctccaaaaaggcccaagactttcttagaattagtgtgggaagccctgcaggatgtcacgctcatcatcctagagatcgcagccatcatctccctggtcctgtccttctaccgacctccgggtggagataatgaaatctgtggtcacattgcaagtagcccagaagaagaggaggaaggagaaactggctggattgagggggcggccattctcgcctcggtgatcattgtggtactcgtgacagccttcaatgactggagcaaagagaagcagttccgggggctgcagagtcgcatcgaactggagcaaaaattctccattatccggaatggtcagcttatccaactcccagtggctgagattgtggtgggagatattgcccagatcaaatacggtgacctgctgcctgcagatggaattctaatccagggaaatgatctgaagattgacgagagctctctgacaggagaatcagatcatgtcaagaagactctggacaaagaccccatgttgctctcggggactcacgtgatggaaggttctggacggatggtagtgactgctgtgggggtcaactcccagactggaatcatcttcaccctcttaggagctagtgaggaagaagatgatgatgacaagaagaagaaaggtaaaaaacaaggagcccctgaaaatcgcaacaaagcaaagacccaggatggagtggccttggaaatccagccactcaacagccaagaggggctcgacagtgaggacaaggagaagaaaatagccaggatacccaagaaagagaagtcggtgctgcaaggcaaactcacacgcctggctgtgcagatcgggaaggcgggtctgatcatgtctgtcctcacagttgtcatcttgattctgtactttgtggttgacaatttcgtgatccagcgccgagaatggcttcctgagtgcactcctgtctatatccagtattttgtcaagttcttcatcatcggagtcactgtattggtagtggctgtgccagaggggctgccactggctgtcaccatctcactagcctactctgtaaagaaaatgatgaaggacaacaacttggtacggcacttggatgcttgtgagacaatgggcaatgccacagccatttgctccgataagacaggcacactgaccatgaaccgcatgaccgtggtgcaagcttacatcgggggcactcactaccgccagatcccacagcccgacgtcttcccacccaaggttctggagctcatcgtcaatggcatctctatcaactgtgcttacacgtctaagattcagcctccagaaaaggagggaggcctaccccgacaagtaggcaacaagacagagtgtgggctgctgggctttgtcacagacctgaagcaggactaccaagcagttcgcaatgaggtgcctgaggagaagctctttaaggtgtacaccttcaactcagtgcgcaagtccatgagcactgtcatcaggaagccggaagggggcttccgcatgttcagcaagggcgcctctgagataatgctgcgcaggtgtgatcgaatcctgaacaaggaaggagaaatcaaatcgttcagaagtaaggaccgagataatatggtacgcaatgtcattgagcccatggccagtgaagggctccggactatctgcttagcttaccgagattttgatggcacagagccctcgtgggacattgagggtgaaatcctcacttcgctgatctgcattgcagtggtgggcattgaggatcctgtgcgcccggaggtaccagatgcaattgccaaatgcaaacgggctggcattactgtgaggatggtgacaggtgataatgtcaacacagcccgggccattgccaccaaatgtggcattctgactcctaaagatgacttcttgtgcctggaaggcaaagaattcaacagtcttatccgaaatgagaagggtgaggttgaacaagaaaagctggacaagatctggcccaagcttcgggtactggcacgatcttctcccacagacaagcacacattggtgaaagcttcaatgccctccatgcctgcacctggttctgaggcttccgggttcttaggccctgggttcagattgtgctgcgtgcccttaactgcttcccgcctgccttcctctccaccccagggcatcgcaggcacagatgtggctaaggaggcgtcagacatcatcctgaccgatgacaacttcaccagcattgtgaaggcagtgatgtggggacggaatgtgtatgacagcatttccaagttcctacagttccagctcactgtcaatgtggtggccgtgattgtggctttcactggagcctgcatcactcaggattccccactgaaagcggtgcagatgttgtgggttaacctgattatggacacgtttgcttccctggccctggccacagagccccccaccgagtctctgttgaggcggcgcccctatgggcgaaacaagcctctgatctcccgcactatgatgaagaacatcttgggccatgctgtgtatcagctcctaatcgtcttcctcctcgtctttgctggcgacacactgttcgacattgacagtgggaggaaggcacctctcaattcgccacccagccagcactacaccattgttttcaacacgtttgtgctgatgcaactcttcaacgaaatcaacgctcggaagatccacggtgagaagaacgtgtttgcaggcgtctaccgcaacatcattttctgcactgtagttttgggcacattcttctgccagatcatgattgttgaactgggagggaagcccttcagctgcacaagcctgaccatggagcagtggatgtggtgtctctttatagggattggagaacttttgtggggtcaggtcatctctgcaatacctaccaagtctctgaagttcctgaaggaggctggccacggcagtgacaaagaggac

SEQ ID NO: 1780 - protein, 1066 aa, Mus musculus
MTNPPGQSVSANTVAESHEGEFGCTLMDLRKLMELRGADAVAQISAHYGGVQEICTRLKTSPIEGLSGNPADLEKRRLVFGKNVIPPKRPKTFLELVWEALQDVTLIIIAAIISLVLSFYRPPGGDNEICGHIASSPEEEEEGETGWIEGAAILASVIIVVLVTAFNDWSKEKQFRGLQSRIELEQKFSIIRNGQLIQLPVAEIVVGDIAQIKYGDLLPADGILIQGNDLKIDESSLTGESDHVKKTLDKDPMLLSGTHVMEGSGRMVVTAVGVNSQTGIIFTLLGASEEEDDDDKKKKGKKQGAPENRNKAKTQDGVEIQPLNSQEGLDSEDKEKKIARIPKKEKSVLQGKLTRLAVQIGKAGLIMSVLTVVILILYFVVDNFVIQRREWLPECTPVYIQYFVKFFIIGVTVLVVAVPEGLPLAVTISLAYSVKKMMKDNNLVRHLDACETMGNATAICSDKTGTLTMNRMTVVQAYIGGTHYRQIPQPDVFPPKVLELIVNGISINCAYTSKIQPPEKEGGLPRQVGNKTECGLLGFVTDLKQDYQAVRNEVPEEKLFKVYTFNSVRKSMSTVIRKPEGGFRMFSKGASEIMLRRCDRILNKEGEIKSFRSKDRDNMVRNVIEPMASEGLRTICLAYRDFDGTEPSWDIEGEILTSLICIAVVGIEDPVRPEVPDAIAKCKRAGITVRMVTGDNVNTARAIATKCGILTPKDDFLCLEGKEFNSLIRNEKGEVEQEKLDKIWPKLRVLARSSPTDKHTLVKASMPSMPAPGSEASGFLGPGFRLCCVPLTASRLPSSPPQGIAGTDVAKEASDIILTDDNFTSIVKAVMWGRNVYDSISKFLQFQLTVNVVAVIVAFTGACITQDSPLKAVQMLWVNLIMDTFASLATEPPTESLLRRRPYGRNKPLISRTMMKNILGHAVYQLLIVFLLVFAGDTLFDIDSGRKAPLNSPPSQHYTIVFNTFVLMQLFNEINARKIHGEKNVFAGVYRNIIFCTVVLGTFFCQIMIVELGGKPFSCTSLTMEQWMWCLFIGIGELLWGQVISAIPTKSLKFLKEAGHGSDKED

SEQ ID NO: 1781 - DNA, 3384 bp, Mus musculus
atgacgaatccaccaggacaaagcgtgtcagccaacacagtggctgagagccatgaaggggagtttggctgcaccttaatggacctgcgaaagctcatggagcttcgtggagctgatgcagtggcccagatcagtgcccactacggaggggtacaggaaatctgcactagactgaaaacctcccctatagaaggtctatctgggaaccctgcagatttggagaagcgtagacttgtttttggaaagaacgtgatacctccaaaaaggcccaagactttcttagaattagtgtgggaagccctgcaggatgtcacgctcatcatcctagagatcgcagccatcatctccctggtcctgtccttctaccgacctccgggtggagataatgaaatctgtggtcacattgcaagtagcccagaagaagaggaggaaggagaaactggctggattgagggggcggccattctcgcctcggtgatcattgtggtactcgtgacagccttcaatgactggagcaaagagaagcagttccgggggctgcagagtcgcatcgaactggagcaaaaattctccattatccggaatggtcagcttatccaactcccagtggctgagattgtggtgggagatattgcccagatcaaatacggtgacctgctgcctgcagatggaattctaatccagggaaatgatctgaagattgacgagagctctctgacaggagaatcagatcatgtcaagaagactctggacaaagaccccatgttgctctcggggactcacgtgatggaaggttctggacggatggtagtgactgctgtgggggtcaactcccagactggaatcatcttcaccctcttaggagctagtgaggaagaagatgatgatgacaagaagaagaaagcaaagacccaggatggagtggccttggaaatccagccactcaacagccaagaggggctcgacagtgaggacaaggagaagaaaatagccaggatacccaagaaagagaagtcggtgctgcaaggcaaactcacacgcctggctgtgcagatcgggaaggcgggtctgatcatgtctgtcctcacagttgtcatcttgattctgtactttgtggttgacaatttcgtgatccagcgccgagaatggcttcctgagtgcactcctgtctatatccagtattttgtcaagttcttcatcatcggagtcactgtattggtagtggctgtgccagaggggctgccactggctgtcaccatctcactagcctactctgtaaagaaaatgatgaaggacaacaacttggtacggcacttggatgcttgtgagacaatgggcaatgccacagccatttgctccgataagacaggcacactgaccatgaaccgcatgaccgtggtgcaagcttacatcgggggcactcactaccgccagatcccacagcccgacgtcttcccacccaaggttctggagctcatcgtcaatggcatctctatcaactgtgcttacacgtctaagattcagcctccagaaaaggagggaggcctaccccgacaagtaggcaacaagacagagtgtgggctgctgggctttgtcacagacctgaagcaggactaccaagcagttcgcaatgaggtgcctgaggagaagctctttaaggtgtacaccttcaactcagtgcgcaagtccatgagcactgtcatcaggaagccggaagggggcttccgcatgttcagcaagggcgcctctgagataatgctgcgcaggtgtgatcgaatcctgaacaaggaaggagaaatcaaatcgttcagaagtaaggaccgagataatatggtacgcaatgtcattgagcccatggccagtgaagggctccggactatctgcttagcttaccgagattttgatggcacagagccctcgtgggacattgagggtgaaatcctcacttcgctgatctgcattgcagtggtgggcattgaggatcctgtgcgcccggaggtaccagatgcaattgccaaatgcaaacgggctggcattactgtgaggatggtgacaggtgataatgtcaacacagcccgggccattgccaccaaatgtggcattctgactcctaaagatgacttcttgtgcctggaaggcaaagaattcaacagtcttatccgaaatgagaagggtgaggttgaacaagaaaagctggacaagatctggcccaagcttcgggtactggcacgatcttctcccacagacaagcacacattggtgaaaggtatcattgacagcactgctggggaacagcggcaggtagtggctgtcaccggtgatggaacaaatgatggacctgctctgaagaaagcagatgtcgggtttgctatgggcatcgcaggcacagatgtggctaaggaggcgtcagacatcatcctgaccgatgacaacttcaccagcattgtgaaggcagtgatgtggggacggaatgtgtatgacagcatttccaagttcctacagttccagctcactgtcaatgtggtggccgtgattgtggctttcactggagcctgcatcactcaggattccccactgaaagcggtgcagatgttgtgggttaacctgattatggacacgtttgcttccctggccctggccacagagccccccaccgagtctctgttgaggcggcgcccctatgggcgaaacaagcctctgatctcccgcactatgatgaagaacatcttgggccatgctgtgtatcagctcctaatcgtcttcctcctcgtctttgctggcgacacactgttcgacattgacagtgggaggaaggcacctctcaattcgccacccagccagcactacaccattgttttcaacacgtttgtgctgatgcaactcttcaacgaaatcaacgctcggaagatccacggtgagaagaacgtgtttgcaggcgtctaccgcaacatcattttctgcactgtagttttgggcacattcttctgccagatcatgattgttgaactgggagggaagcccttcagctgcacaagcctgaccatggagcagtggatgtggtgtctctttatagggattggagaacttttgtggggtcaggtcatctctgcaatacctaccaagtctctgaagttcctgaaggaggctggccacggcagtgacaaagaggacatcagcagggatactgagggaatggacgagattgaccttgccgagatggagcttcgccgaggccagatcctctgggtccgtggcctgaaccggattcagactcagatcagagtcgtcaaactgttccataataaccatgaagttgctcataaacccaagaatcgtagctccatccacaccttcatgacccaacctgaataccccgcagatgat

SEQ ID NO: 1782 - protein, 1120 aa, Mus musculus
MTNPPGQSVSANTVAESHEGEFGCTLMDLRKLMELRGADAVAQISAHYGGVQEICTRLKTSPIEGLSGNPADLEKRRLVFGKNVIPPKRPKTFLELVWEALQDVTLIIIAAIISLVLSFYRPPGGDNEICGHIASSPEEEEEGETGWIEGAAILASVIIVVLVTAFNDWSKEKQFRGLQSRIELEQKFSIIRNGQLIQLPVAEIVVGDIAQIKYGDLLPADGILIQGNDLKIDESSLTGESDHVKKTLDKDPMLLSGTHVMEGSGRMVVTAVGVNSQTGIIFTLLGASEEEDDDDKKKKAKTQDGVEIQPLNSQEGLDSEDKEKKIARIPKKEKSVLQGKLTRLAVQIGKAGLIMSVLTVVILILYFVVDNFVIQRREWLPECTPVYIQYFVKFFIIGVTVLVVAVPEGLPLAVTISLAYSVKKMMKDNNLVRHLDACETMGNATAICSDKTGTLTMNRMTVVQAYIGGTHYRQIPQPDVFPPKVLELIVNGISINCAYTSKIQPPEKEGGLPRQVGNKTECGLLGFVTDLKQDYQAVRNEVPEEKLFKVYTFNSVRKSMSTVIRKPEGGFRMFSKGASEIMLRRCDRILNKEGEIKSFRSKDRDNMVRNVIEPMASEGLRTICLAYRDFDGTEPSWDIEGEILTSLICIAVVGIEDPVRPEVPDAIAKCKRAGITVRMVTGDNVNTARAIATKCGILTPKDDFLCLEGKEFNSLIRNEKGEVEQEKLDKIWPKLRVLARSSPTDKHTLVKGIIDSTAGEQRQVVAVTGDGTNDGPALKKADVGFAMGIAGTDVAKEASDIILTDDNFTSIVKAVMWGRNVYDSISKFLQFQLTVNVVAVIVAFTGACITQDSPLKAVQMLWVNLIMDTFASLATEPPTESLLRRRPYGRNKPLISRTMMKNILGHAVYQLLIVFLLVFAGDTLFDIDSGRKAPLNSPPSQHYTIVFNTFVLMQLFNEINARKIHGEKNVFAGVYRNIIFCTVVLGTFFCQIMIVELGGKPFSCTSLTMEQWMWCLFIGIGELLWGQVISAIPTKSLKFLKEAGHGSDKEDISRDTEGMDEIDLAEMELRRGQILWVRQRIQTQIRVVKLFHNNHEVAHKPKNRSSIHTFMTQPEYPADD

SEQ ID NO: 1783 - DNA, 57757 bp, Homo sapiens
gcttagactgggtacctcttgcccttgcagatgctggatacttatggctgctctaatggtttctttttgtctatctttgaacctttattccagagatccagttgtcatcggtatccaggaagctctcctcttcctcctcctgacgtctactactacagttgctggttgttgctaaggttgctgccatggtaacatgcacatcctgtttacaccttcatctgggcaagttggtctaagctaggaacctacctaccctggacaactactatcatcaccacctggggacaccaatcatcgtgacacggagtccaccttccactcagttcccccatcctcttcctcctctcgctgccagacttcatacggaagaaaggatctagacttcggacggctactcgggagcttattgcacaagatatattcaatctattccctcactgggcccccagagaagcaagaagtaggaagaagttgagacagggaggcaggagacactggtcagttgaagggaaacgctacatcttctctggttgaggggcttggtaacagcaggcaaaatgacgaacccatcagaccgtgtcttgcctgccaactcgatggccgagagccgtgaaggggactttggctgcacagtaatggaactgaggaagctcatggagctgcgttcgagggatgcactgacccagattaatgtccactatggaggtgtacagaatctctgcagtagactgaaaacctcccctgtggaaggtaaaggccatatcaggggtggggagttggaggaaggtggctagtgtttcaaaatattgttttcccagcttctagagaaggcacatttctggaggcccagctggtatatttttgtctggtgggaaaggtatggcatctgaagcactgaaaggaggggaggccatgaagaaccgtatctttcccagagatgatgtttagaaagtgtgctattctctaaagattattcttttctcctttttcttttctttctttcttcttcttttgtttctttttttttttttttttttttggtgagacagggtcctgctcttttacccaggctggagtgcagtggcgtgatcatggctcactgcagcctcaacctcctgggctgaagcgatcttcctacctcagtctgctgggtagctaggaccacaggcgtgtgccatcacacccagctagctttttagatttttttgtagagttgaggtctcagtatcttgcctagactcatctcaaactcctggacttaagtgattcttccaccttggcctcccaaagtgttgggattacaggcacagtgagccactgctcctgacccctcttttctcctttttctgtatcagtgtccagaaaggaggatatttatttttaaaatgtttatgttataaatgttgttgtcagtaaataatcaagtctgttcttctatatgtctgattataaaataatttaattcttccctacactgatcttacagtttaatgaatggaggaaggaagggtacaaaaaagtgaataagtccagctgcccaattgagcacttctctattgtatactgttagaaatgggatgataggccaagcaggtgggtggctcacatctctaatcccagcattttggcaggctgaggtgagaggatcacttgagcccaggagttccagaccagcctgggtgacataataacaccccatctctatttttttttttttttttttggagacagagtcttgctgtgtcacccaggctggagtgcagtggaatgatcttagctaactgcaacctccgcctcccaggttcaagcaattctcatgcctcagcctcctaggcagttgggactacaggtgtgtgcaccaccacgcccagctaattttttgtattttagtagagatgggatttcaccctgtgggtcaggctggtctcgaactcctgacctcaggtgatctgcctgccttggcctcccaaagtgttgggatgaggaggcttacaggcataagccaccacgcccagcctctattttaaataaaaagaaaaaaaaaaggaaatgggatgctaaatcacaaggtatataactgtacccatcatatctttggatcactcactgttttgtgtcagggaattataagtgattttttttcaactctgctggatacacttttaatgtagttctccttaatcttttttgtttgttttgttttttgtttttttggtttttttgttttgagaaggagtctcactcttgttgcccaggcaggctggagtgcaatggtgcaatcttggctcactgcaacctccacctcctggattcaagcaattatcctgcttcagcctcctgagtagctggggttacaggcatgtggctaattttgtatttttagtagagatggagtttcaccattttgaccacactggtctcaaactcctgacctcaggtgatccgctcacctcaacctcccaaagtgctgggattacaggtatgagccactgcgcccggccttaatctcttcttaaaagctaaaaaaacttaaaagataatgaaaaattcagcttcaggctttggcccagcccagttgcccagtgtgccatggtattatgaaattttgcctcatcaaaatgtagaaagaacaaaaggaaacttgctttttcactttagtctggttttagcatctctgtagcagattcttacttggccctatacatctggcagttcatggttgagtagcatgagatggagcaaagatcttgtccattaggggctttcagtctcatgtggtctcctatttctgaatcttcctcagaggccacagcatatttctcaccaattctaagaagttgttaccctttgccagtgctgtattataagttagtgacttggagcctagactctttaggatgaaaaaagagaaagagagttttacatagatatctatacctagtttatgtcttattttctttacaacctaagggagcttccctacctgttttctttacttctagaatttggtttcctatctcataggctttgagttcaaatgatagctccaccatttactaactaagtagccctctacagtttactcagcctccctgagtctgtttcttctttgaaaataatgttaataacacctagcccatagagttactgagattaaataatacatatacagtgctcatacttataattaggtgttcaatagattagttttctcagattaaaacagagtccatgcatctgtagatacttgccagaacatgggtgcctatggagtgcaatgttttgtcctatctggagaggttactgtgtgtgtaactgcaactactgtccatttcatttgctcacttcttaatcacaaaaaaaaaaaaaaccctgggtaaggtggcaatatctaattgctttcatgtggctcagtctttgccttctaatggtagtccttaatcatacccctttgggctctgtctacttcttgccagctagatttctttattcagtcacttttacagccgtactgactgctgagggtctgttcttaattatatcttcactgagattatgcagtactttacaaacacccatcagaatttaaacaggatctttctttttcccttcctatgctgttcttgatccctctggtcagctgtctgtctcacaaacaggaactcgggagtccaaagaagctggaacctagagaactcctgacagcaggattcaggctttcctccaattttccagatcccttcccagagctgccactgtttactttctgattcccagagagcttcctttcccaaaggccaacatatattctactttctgtcaacattggatatcaaatgttatagacatagctaatgctcttggatcctttcccagtcctggtttcagccccttccaatggcaagtgcttccctcgttacagcccctggccatgcctgtagcctaggactcctaacactggcacaattttctactgccatgtactgcttccttagatcacaaatatgtgtcctggtgtttttctttcttttctttcttttttttttttttttttttttttttagaaggagttttgcttttgttgcccaagctggagtgtaatggagcgatattggctcactacaacctccgcctcctgggttcaagcaattctcctgcttcagactcccaagtagctgggattacaggtgcacgccaccactcccagctagttttttgtatttttagtagagacggggtttcatcatgttggccaggctggtctcgaactcctgacctcaggtgatccacccacctcggcctaccaaagtgctgggattacaggcgtgagccatggcatctggcctttttttttttttttttttctttatgagagatggggtcttgctctgttgcccaggctggtctcaaactcctggactcaagcagttcttctgcctcaccagtttgtattaatgtaagagttaccatagggcttgttctggaactggggagacggtgttggaaaacaacctttccattagtaatttttagtccccagtaccaacagtgacgtcctagtgtgtaagaagaataaagagataagaaaaggagaaaaaaataagaaagaaaaagaaagaaaagaaagaaaagaaaggaagaaagaaagaaaaaaaagaaaagaaaagaagatatagaacagctaagacataggagtatctacccaggcaagggtaatgctcacctgtttagttagggtaggcagacaaaagatccccaatatgctcatcctataaaaagccagcctgttcatggaaggccacacagcctgacagcctaggagaattttgtcattgtgggaggtcccagtggaccaataataagaataaagaaatgtacctggtgcttgaattctgctagctggaaaccaaggtgaaagtgaagatcagagatattgtttcctaaaatataacccttttcctttattttctatggactgatagcatctttagtatagattgacagaatttttttttaaaccatagcttttaagggggcttatggaacttgaagtttattacatttctgatactaacatggttttattatcatagatttacacaattctaaaggcaggtgggacttaattatctcttttggctggccgcagtagctcatgcatgtagtcccagcactatctgtgctttagctaagatactctgtgagactgctctagcataagaagcatttagagcattaatggagtataagtcagaaggcatgaaatattccatcccattctacctggtggtaagaacttaggtcatttaaaccctttagcctggagagagggagagagaaagagattattattattattattattattattattattattattattattattttgggatggattctcactctgtcacccaggctggagtgcagtggcatgatctcggctcactgcaacctccgcctcccaggctcaactgatcctcctgcctcagccttccaagtagctgggaccacagatgcgcgccaccatgccgggttaatttttgtattttttggtggagatggggttttgccacctctacctcagcctcccgaagtgctgggattacaggcatgagccgccactgacccaatgtttttttgttgttgttttcaattttatttttgaaacagggtcttgctctgtcaccgaggctggagtgcagtggtgaaatcatggctcactgcaacctccacttaccaggctcaagcagtcctcccaccttagcctcctggttaactgggactacaggtgtgcaccaccacgcccagctaatttttgtattttttttttgtagagacagggtctctccatgttgcccagggtggtcctgaactcctggcctcaagcgatctgcccaccttggccccccaaagtgctaggattacaggcatgagccctcatgcgcagcctcagcccaatgttttgatagtggcttgtgttccttgagtatacattagctagttagagtaagaggagttgccccagtggccaagagttggttagacttaagaaggcttggagatgtttagctacatggccttcagcaacaaccagaaataaggctgagagcatgagccaaaaagagaagaaaatttagggcaacaagaaagggtgggggagacataaaagagaatacatgtttacatcaaagtaactaaagatttcagtctttatgtctgtatataaacaaaagcaaagatgcaggggtgagactggagctcctgggcaagctgtgttgccttgggtttatcaggagggacaatctgagcattttgcacaatggaatccttcttgtttgcttgcttcgttccccattccagttttttccccctccttttattgtctcttctttccctgtcccattcccacctcaaccaatctttccaatccccaaagaacagagcagtttggttggtataggctagaagatagccttttaccttctgtgtggtttcctgtggagtctcatggcctcgtgagtggaagaagctttttgtgaatctgggatgaaaattacctgtggcttaaggggaagaaggaagaggtattttccttagtctcaatacccttttgtgtgaaggaaaaagggatggtcctggcggcctaggtagaggttatacgtgttcttttttccctgtagaattttgcacgttggtccttagctatgctatcctttttaggaggaagaatggtgttttctgaggaagagttaggccagcccttggaggcaaggtctgggcccagaacagaatgggaaacaaggggagccttgaataaacagcaaattattaactgtaggccttctttcaaaaggctgaaggctattttggttgaatttggatctaaaagattgttggtggaactttctgttttatgttccttctgtacccttctacttcttttctcctctgcagagttgaaggcgtgacagtgagatattgagggcctccaattctttttcaacaacattcaactaatacttaaaaactgctaggtgctagggacacaagggtgaacatgacaggtgcagtgcctccttccatagagcttacaggctaaaagaagatgcatatgaatgaaggcaatttcagaaatcttgccatagggcttcgatgaggaagagcagcgtctatgggaacacagtgtagggacctaagctgaaggcattgcaggggaggggaagggggcttagagctggagacagcacacctgtatcatttagggattacccagtgaagctctagcatggccacgctctatgatcattgctaccacctgctgaatattcctggcataagatgccagcatttttgccttccttaattactgggtagttactaggtttagggagctgagattccttggggagtaagtggcaggcgggaaaaaaaatgtgttttaagacggccaacccaaattacaattttgttttattagcttgaggatttagatgaacgtctatcaccttaagatctctggggcttaactgtgttcccgtcactgtgccttttgagggcagtggcatgttttaccaggaattgtccattttgctacaagctgagatgtactgggattgggctcttcctcggtgtagcagattgaaatttctagtagtattgtcaatctggaaaaaattgagtacatatcccaagtaaatgttcacctacaagactattgccttactattaatacatctaacacttttatttacataataagataggcaaacatatattttcctcactctaacagatggatgcatgccccccgcttagagaccgctgctctaaagcacggtggcgttagggggatgtggaggactaggtgagtgaagatgggatggaacagatgtgagaggaagatgggcaactgggttctttgagatttttcttccctatctttagagcttatagtctgttctggaatatcaatttttaggagctcctccacttgaggttagaagcataacctctattttcctctttctttgtgccctctgccctgtagccatcatctcttgccccaactctactaaggatggcaaataagtgaccctaataacagtgatctgggcatggcctcagagattaacattctgtggtccactctgcctaccaaattttgggcagatggattagcactaactaattcacgatgtgagaaggactcaagccaaaagtgtcctccctctgcccctccccatcccccaccacagggaactccactttgcatcctaggaattccctgtctggtttgagtttcatgcctagggctgaattaggcttcttgtaggctgtgggttctctcttcctagcccagcccaggctctgccagttcttttctacttagccctccttgcctagagctgggcttctgggttcactgtcataatgctgtccagctggggtcagagggatcttcacgaggagagtagctaaggcttccccaacctggaagcaggaggcttccccttcctgctttctctcctggagccctttatgctccattcctttgacaactcagcagcaactgttgcaagttttttgggggtctgatttggtttttaaccttctcattcttggcttacattggaccattagctgttgggaagaaaaatagcattccctccttgggtgaagcagatactgcatctaccgaaagtggggctttcattcttattatttagctccaaggtgggaatatgacaccagatggaagcacattcatgaagtacagaaggtggcagagtggcagagcagaaagctaactagagagctctagggagacttttttccctgggccacagttgctgttttcaaaaaaaggccaagagcagggggcgggataaagggaagcatgccctgaggaagcggcccaccttgggaagggttttgctgaccagaatgagaaaagaagcattgttctccaagttcatcatcctctggctgtgaccttgaatcaactgctttatctctaggagctggaagtctagcagatagggagcaaatctccaagccatgcgtgtattaaactggaggtgctgaagcagggaaactgctgtatactcggaagagtagcattcggttattagccagagatggctagatcttgcatggccctattttgattttaagttactcctccccctcagtccccaaatccagggttgttggggttttttaaaattaattttaactttttttttttgagatggagtctggctctgttgcccaggctggagtgcagtggcgcaatctcagctcactgcaagctccgcctcccgtgttcacaccattctcctgcctcagcctcccgagtagctgggactacaggcgcccgccaccacacccagctaatttttgtatttttagtagagacggggtttcactgtgttagccaggatggtctcgatctcctgacctcatgatccgcccgcctcggcctcccaaagtgctgggattgcaggcgtgagccaccacacccggccttttttttctttttttgagacagggtcttgctctgttgcccaggctggaatgtagtggcaaaatcacggcttactgtagcctcaacctcctgggctgaggccatcctcctgcctcaacctcctgagtagctgggaccacaggcacacgccatcatgtccagctaattttttttattatttgtagagacagaatctttccgtattgccccggctggtctcgaactcctgagctcaagctatcctcccaccttggcctcccaaaattctgggattacaggcatgagccaccaaacaaaacccaaatccttttaaggaaggacttaaaaggtattctgctgtctgtccttctcaagttccaaaagaggacagccttcaaatcaacccagagaaaattctccctggtactatatgagtgggagaagattctgctgcctcctttggcaaggtgtcataactcagacagctgggaagtccctcctgatgtctaccctagccccaccctttctggggctgagctggttctgataagtagtgcctctgccgatgtcgttggcccttccctgctggagctaagccactgagggttgggctgcatttctcctcccaggccctaggtcctgcacactcatggcagacacaaatattccactgctgtttattctatgttcccacccagcctgggcaggggccgtgcacctccccagcatggggtgggggtgatgacttcacagctaaacattctctttgcctctcccagctcatgtgttcagtctggttcatagggccagaagtactcccactctgggtggggctttctctctcatgttcttgaggacaagatttcccctcagtttcctgaggaatttctaggggaaacccttttcctgtgtttccagcattctctccctgccaagttttccttcccctctccaggaggttgtgtgagcatctgagaaaccactgcagagatcagggccttttagagccttttcccaggctggacaagtatttgtgtgaaattacagctgctgagatcagggcctgaaagactctctagggcagaaagaattggaatggaaagcccaaaactggggattggccgagctcccagtcccacatggctttcccatgcctcaccacatgtcagagaggattcccaaggctactacagctaagagccttgacctgccccgccttgctgcagggcatactgggaactgagacagccacttgacttcttaaggttgctattgtacaagctcagggtgacttaaggtggaacacatagatgagtagaaaatggcaaaaaaaagaagcaagcaagtgactttgagagcatttaggtaagaacaagccctgactttttatgttttccatagtgtatgtcacttcatttgcttgggtccaaaaaaggccataagaaaggttttattgagtacaaaattcataggtttggactctgatgaacctgatggcgatgttaccatccctgaggccaggaagaaaaaagacaggactaatccaccccaattgtagacagtgggaacagcgctggcttgcttagaggtacagaggaaagcagcatgcaaccctgccccgtggtgaaggaagtagggtggccaaccatcccggtttgcccgggactgagcggggttcccaggaggcagaaacttcagtgctaaaacctggcaagtcctaggcaaaccaggacaagttagtcacactagattgaagcctcagctgagtgcagctgcctccatgtcccagcgtcctctgtatctaggttggcatccagtggccctctgtggggtggcatagactctgccacttaataagctcaagtagtcatacccctgccaggccttagtttgcttctatgtcaaattgggttaatagtagctaccaggtaggggtttgtgatgcttgaatgagaaggcatgaatgtgcctggtgaggcatctggcacatagtaatcacttaaatgttagcaatcttagttatcactcattcattcagttcattctacaaatttgtgtgtgtacaatgtgctgggcaatgctgtaggcctgaggaacaaagataaaaatcctgcccttgtggaggaggtggacaaacaataaatgaatgtgtcctattatatgctaggtgagaagacctgtggagggaaatgattgagcaggatgagggggatcaagagtgccaggtaaatacagtggtcagggtaggcctcactaaaaagaagatgtttgtacaaagacctgagggaggtgaggaagtgagccctctccaacaaagaggaatctgggcagagggaacagcttgtgcagaggccctgatgtagatgcctgtctagtgcgtttagagaacagcaggcaggctggttgggccagatctcagtgaacatggagaaactagtaggagataaggactggggggctgggggagtcataagggtcctggaagcccatcattaagtccttggtgcctagttttactctaagtaaaagccagagggttttgagcagatgaatcgcatgtactgccttggatcttaaaaaagatcattctggctaatacattgagaagagactaagaacaggagagggagggtggaggcaaggagaccagttagaagatgattgctataatccagatgagagaggatggtttagaccaggatgataacagtgaaaatggaaagtgattggactttagatatattttgaagctgataggatttctcaactacatgatataggagatgggggctgggcatcaaagatgattacagggtattagcatgagagcagagagggacaggtagccctgttctctgcccctcatatgtccctctttttgggagggagggtttcattaggctattggggtgcaccttatgatctttaatatctgatgtcttggtttgccctcataatcatctactaaaccttggtaagaaggaaagggcatctactccctttacattgtgaatcctgcttttttgagaagcgtcccaggtagcttaacaaattaccagcactcctgccagcaagcctggctctccagcacagcagacccaacttggcacagccttgccatctctggtccctggggagaaaggaccagcaaggccctgcccctttggcaagtctgcctctgcctgtctggggctaaagattccctgcccagaacactcctttcccaggctctggctttccctcctactgggaacctgacttctcaggctggtggggcagggagtctctggggagcaacccaatttgcttctagaggtttggccaaacctcacagctctgcggggctcagctgtgcccctaagctggaggccagggtgatgtgcttgggcactgggagtcaggagaccctggataagccatcaggcaccacttccctaaccagcccctgtgtctctctcctaagcactagcaagtgaatgtggtctcaaaagagggccctcacacccctaactgcataggtgtggatgctagttcatcccctgcccccccactttcatctcccaccccccacatctaccttcccagacagatgagtatcttatgtatgtctcctgatgctttttgttttataggatagggaaatggaggccatcccaaactctgcaaataatgctcccttgggtacctattttcccattttcaaaatctttatctgttcagatgtcttcctcaggtcctaacccaaatctctccttttgacacttaaggtaacactcctgggttcttttttgagacagagtctctctctcgcccaggctggagtgcagttgcatgatctcagctcactgcaacctctgcctcccagattgcaattctcttgcctcagcctccctagtagctgggattacaggcatgcgccaccacacccagctaatttttttgtatttttagtagagatgaggtttcaccgtgttggccaggctggtttcaaactcctgacctcaagtgatacacccaccttggcctcccaaagtgctgggattacaggcatgagccaccacgcccggcccactcttgggttctattcagtgaagattttcagtgaagagtagacatttgcctgtataccacgtctgcattccttcctcagcaacagaatagcccttcacattgactaaagtgtaaagaaggcctctggcatccaagtcctttgcctccgttttgtccctgcagcctccatcatccacttcttgttctctctgtgaagctcagttgaagttcccttcctctgattctgaccctcctcagctgctaaccttttttcaagacaaaagtcaccctaccctgcctctgggaaacccttcaaaccggcaaccaacagcttccagtgccaaaaccaggactaatttgcctcagcgtgtaaacaacttgaacaccaactggcattaatcaccatggtaggattgcccctcttcccttcaagggtagccccacctggggacccatgaaaggacccaaatataaggaaagcactgagaataattctgcctatctcttgtccctctgggaaagtgcgtagagagtaggtgtggtatgtatgtggtgcatgttctgtgtgtgtgtgtgtcatatatctgtgtggtatgtattgtgtatgtggtttgtgtttggtgtgtatgtgtctgtatattgtgtataaggtgtgtgatgtgagtggtgtatgtggtttgtggtgtgtatgtgtctgtatagtgtgtgtggcatgtggtgtgtgtacacacaggtatgtaagcaaacgtatgttggtagggaggatgctgctaatcaagtactgcgtggcatctgaaaactttgtggccccacctttcttgttctctttttattcaatctgagtagtagtacttcccttagtacctacttagtccttagtagaatggtagtatctctcagtggtgtgtgtttgtgcctctgtgagtgtgtgtacatgcatacacctaggcacacaggtgtgtatatgtgtgtgacagaagaggggcacatgtgcttaaagggaatgcccacaagttatagtcttaaagactctgccctgatgctcccctaaagctcctggatcttagaattaggacacatgtgtgggctctgcctccatcttgcatgaccttgagcaaggagcttgttcttcctggcctttgtgtgtgagccaatggatggcagctcactctgcttttaaatcactgcagcatttacctgttaatatgacataaaagttctatgtgaatcccaagaaccactttaatatttaatgttctcagagctggagcctggggcatactcaatcagtagcagataagattttatgtctggttaagaatttatccagcttatacttgttactaagataagtgagtggtcccatggctgactagtttcattttgcccatttttagactgaaagttccaccctctctaagtcctgggcagattaggatggttgtctctaactggatctcatacttgagcaaatcaggaaggaaagggtcttttttatttattttattttagagacaaggtctcattttgttgcccaggctggagtgcaatgacgtgatcactgctgctcactgcagcctcaaactcctgaggtcaaaacaatcttcccacttcggcttcctgagtagctgtgactacaggtgcaccacatcatgcctggctaatttttgtcttttttgtggagacaaggtttcaccatgttgcccaggctggtctcgaactcctaaacataagcaattcacccaccttggcctcccaaagtgctaggattacagacgtgagataccatgcctggcctctttattttatttatttttgagacagcgtctctctctgttgcccaggctagagtgtaatgacatgatcatggctcactgccacttcaaaactgccttttatcattttccttttttcctacattcattcatccactcctatctccttttcaggtctgtctgggaaccctgcagatctggagaaacgtaggcaggtgtttggacacaacgtgatcccccccaaaaagcccaagactttcttagaattagtgtgggaagctcttcaagatgtcacgcttatcatcctggagattgcagccatcatctccctggtcctgtccttttatcgccctgctggtgaagaaaatgaacgtgagtgtcctaaacagctcagcgtgactcttatctgggttctttccaccaccaccaccaagcgcttagtattggtggctgacaggttatagcttaaaacatttcccccattatccagagtgggctttccaaaggaaaccaagcagtagctactaagctattcttccaactcatccttattccaagggttcctccccaccccaccctcaccctctgtcttctattaaatcctttttcggaatgtcaggaatcctctacccttttaagacattttatttatttattaattattattattattattattttaatggaatcttgctctgtcacccaggctgggtgcagcagcttaatctgggctcactgcaacctcctgggttcaagcaattctcgtgcctcggcctcctgagtagctgggattacaggcgtgtgccatcacgcctggctaatttttgtatttttagtagagacagggccttaccatgttggccagactggtatcaaactcctgacctcaggtgatccacccgccttggcctcctaaagtgctgggattacaggcgtgacccacttgcctggcctatttaataatttttacaacatagagacaaggtctcactatgttgcccaggttggtctcaaacccctggggtcaagcgatctgcctgccttggcctcccagagtgctgggattgcaggtgtgaaccaacacccccagccaggaattctctacccttatccaaccaacaaaaccctacatctcaaagtgccccctgccaccaattgtctggcatgatgggaaacagtagtgaaagcctgaccatgttgggaaccataagtgtgaccttacatgtgacttccctaaatttgatagtttgtactatttagtcatttgcctcttttggattaacataaatagttacactagtgataagacaatactcaatcctgctatcctctgatatcctcttccagccaacagttgtatttgctattattcacttttcctgactttctatcttggggtgattgtggaagcactactcctatttcttaatgtcaacaaaagcccttcagtgactatttctctcccttcctgggatagtgtgtggtcaagtcgcaactaccccagaagatgaaaatgaggcacaagctggctggattgagggggcagccatccttttctcagtgatcatcgtggtgttagtgactgcctttaatgattggagcaaagagaagcaattccgggggctgcagtgccgcattgaacaggagcaaaagttctccatcatccgaaacggtcaactcatccagctccctgtggctgagattgtggttggtgatattgcccaagtcaaatacggtgagagctccgtgtttcttttgcttaccccaccaccacccccatttaagggataggtcctttggcatgagggggctgggaattgctgaaaacccaaaaagataagatccaaaattgtattcacttctaggttagagtttaaagaggttgtgggaagccatttcagaaaggagtagctgaaactctgtcgcaagattgtcagacttgtaccctgtgtgtcttagggttaaaagtgtataacattcaggccatggaaaggtgttggggatgaataagagtttgaatttataatgcctggaaagcaaccttctcccagattgtacagagctgaagacttgtaaagagtctccatgtactctcggccattgctgtctagatagggcccatgggaacagccatgagatagggttgaaggagttggaggaccctaccctcagccagtctcttactatctccttcactgtccctccttcccctttgtgctctaggtgatctgctgcctgcagatggaatcctgatccaagggaatgatctgaagattgatgagagctctctgacaggggaatctgaccatgtcaagaagtccctggacaaagaccccatgttgctctcaggtataggccctggctgcccaagttcccatttacctccctgcaaacacctaggccacaggatccagaccctgttctctcctctgactctgtcccatctccttccctggggttcagctggggcaacagcattttggtgggtggaatacaaggatatcaggcagcctaaatgaagttttccatgaaacaagtgttataagggccttgaaggggctttgctggttgcaggggtggcgggggcaggagggagggcttaccctaaagcggttagacacattttcctccttactcccaatttgtctggtctgttttaaatgcgcccagctcttgaccttttcctactgtgctaagcacatcattatccatggggtagggaggagtattttttcttctaagtttgtgtttcataccaaatcatgtctaggtattaaaaaacccattccttcccatcttctcctttcccgtgtagggacccatgtcatggaaggttctggccggatggtggtgacagctgttggtgtcaactctcagactggaatcatccttactctcttgggggtcaatgaggatgacgaaggggagaaaaagaagaaaggtaaggggcatctggaatgagattctctttcctctcatccccatggacaaacaaggaagcgagggagcagatctggatagaaagcatggttggaagaatctgctgccatgaagaaagcagatatccaaactccttgctgagataaagatgtaaatccttggctccagggagctctgatgaaaaccagatcctggctctaggctcccaaatcaggttgaatttgagccttgatttttatgtctaatggtagcttgtaaagggatgagttataaagcctgccctaaataaactggctaggtgctggtagccccaaatgccttccgtgtactccccctccttccccaactttcttcctcaaagatggggggttaaacgaaccatcaagactaagagaaaattggccagaagagtaaaatagatttctgccgaaactgtaggctctcaatggaagagacacacagctagaagagtaggaacagttagttcagtctttgccactcagttattcctgaaggaaagaataagagggagaaagaggagaagatactaaaaccaagtctacacgtttccctaagcattccttcttcccttaggggagagaaggtttctaccacttggctggagaatcatcttgagctgtttagtggaggacagtttatgaaaaggaaacaaaacacattctctcaggaactaaataattcatttctgcagctgcctgcagatgaataagggggaagcttgcctggtgctgttgaagtaacacggagacacctttcaaagtctttgccatcaggcagaaacggttcaaacctctcacttcctaatccccaccccatttttccaagcaatgtgactcaggccaggagcaagagaaagcacctcaggtatgagtatgcactcacctacatgagcgttttggtggatatcccgaggattcatgacagcctctagcaagaatgaatgaaaacagagatgtgagcttcctttacatttatgtcccttccctgcaacccaaacactttgctgttgtccttctgggctctgagcaggaccaacaaattggatctcttaatagttactttgggtttcgaccccacttttttctttcttgttcaaacaggtaaaaaacaaggagtccctgaaaatcgcaacaaaggtaacctctccaactactcatttaccatctctacctgcccacactcaaaccagacctttccaggccatcttccttctcccttttcctctccataaatctgttatctgctgctgtggctcagatgcctcatcctgaggaaggtgcagagatttttggggtggtctcaaggtcctgatcccaatctaagatgggacaacagcaccctctgctgttggctcacagaatgtcatgtcaaggtttgtcttggggagtgtgtaggattgatctgctcttcctagggagctgaactctgcttcattgacctcagcctgatttaaacaccaacagtcatcagtttctgggttggaagacttcagggtcctcatggtggagggaggtggggtgggtagtccctgcaccgtcctcttgctagcttcctcataagtgtcctcttctggtctggatcccttctctgctggtcttctcaggggtgcttggagagagccctttctctgtatctctctccccacctcccttctttgttcttgccacagtctgttttcttcctcctgatctgatgtgtgtgtctcttttggtgactgtgttcacattctgtctccgtcttcttgtttgtgagtctgacagcagggactactcaggaagggtatcctaagcaaggggctgagccctatagcagtgaaagtggagtggtgctgggagccagcaagaactactgtcttgtgacgctcctagagatttgtttttactttgtaacccacatcacagcagtctttagaaataaagtcatcacattggaaaaccagagctaaacagaaataattctttaattttaggtctttaactcttcttttaaaagcaaaatggatttatatgtctctctttatccctgctttctcttattccaggaggtccctcacaccagcttcttccctcttccccaaaagacttaaccccaggtcccactctgtatctctctacctttgtcaggcagggaagaaagggaattttcttttcctatcctcaactgctagaaggggctggaaaataccctgggtctgggggtatgtgtttcttccctgacaatcgagagagagagagagagagagagagagagagagataaaccatttaacagagcaatcttgtgctccagaaacatctgccaaccctctccttcagcccctttctgcagtaaagattcactattttaagcactgagttccaggaaggatggttgttttaatagtgcttagtgacatgattaatccccttgctggaataaacctagcttgggactctgaggtagtaccaggaagctgccactgaagaagaaatccataccctaaaagcaccccagtttcatctaaactcattagaatattattccaaaggccctaatagagtgttgaaggcaagttccatgtctagcatgggttggaagtggtcggaactgatgtcagggtccaaggtatattccgggaaagagacaggaaggttttctggtttccacctgcctgccactcagtgctaccaccttgcctgctcacctgtcctatttgtgtgtacactccagcaaagacccaagacggagtggccctggaaatccagccactcaacagccaggagggaatcgacaatgaggaaaaggacaagaaggcagtcaaggtgcctaaaaaggagaagtcagtgctgcagggcaagctgactcgcctggctgttcagattgggaaagccggtgagtagggtagagcctcgttgtggtttatcaatgttgtcttggatcctcatcacttttatccccttctttctgcaccgaccgagactggcagaaagaagctgaaacttcagggtggctagttggggctaggcggctgtttccctatctccgccactgtttggtcgctccctaggctttttcagagagaaatgttttcctgtgtgtaagggttaatggccctgagatctcttaatccaaatgaatgagaaacaaagagcatatattacagcaggggagatttacattagcaagaaggaagactttaataactgcttacctgtctcttgctttgggttgtaaattccttaaagatagagaaggctgcagcttgctacaggcaattctctagcataggagtaggatctggctaagcacagagcaataaataccaagtaaggactggaggaagaaggaaggctgtggttacagaggctctctccagaagagaggtaactaaataatgcactctgcatatgaggaagtggcttctccatcacttgcctctacattttcctgtctcaccaccttctttcaatggagggggagaaaggggagtgggaagaagaaatagaagattgctactttagtggacatatctctcaaggaacagtctttttttttttttttttttttttttttttttgagatggcgtcttcctctgttgcccaggatggagtgcagtggcaccatctcagctcactgcagactctacctcctgggttcaagcgactttcctgcctcagccacccaagtagcagggactacaggtgcacaccaccaagcccatctaattcttgtatttttagtagagatggggtttcaccatgttggccaggctggtctcgaactcctggtctcaagtgatccgcccacctcggcctctcaaagtgctaggatacaggcataagccaccgcaccctgccagagagtagttttttaccactgtttattctctgattccacctttctgtttaccacaatcataatcagcacatctctgcactttatacagctgtatacaacttacctcgggttcttgttaaagtgtagattcagttcagggggtctggtgtggagcccgagattctgcattcctaataagcccccacaggatgccagcaccgctgattcagtttgcacacattggatggcagggatctatgctgcccaccatagcagccactcaccacatgtggctgctgcaatttaaattaattaaaagtaaataaagttaaaaatccagttgctggggtaaattttagttggtcacgagccacatgtgctagtagtggctgtcatattggacagcataaatagagaacttcttaagcgtcacagaaagatctattggactgagttggcctaacctcttcatgtccattctggtacccagctaattttaactactgtgaaatctcttgcatataaactatacatggatgagatgaattgcaggtgcagaatcaaacacacaggtttgaaacattaaatctaccccacctaacccttgtactattctcctaatccttgccttgttgttgttgttgtttgtttgtttttgagacaaagtctcactctgtcacccaagctggagtgcagtgatgcaatcttggctcactgcaacctccacctccggggttcaagtgagtctcccgagtagctgggattacagatgtgcatcaccatgcctggctaatttttagtaaagacagatttttgccattttgggcaggctagtctcaaactcctatcctcaagtgatctgcccctggactcaaggaatcccatggcctcaagtgatctgccggcctcagcctcccaaagtgctgggattataggcgtgagccactgtacctgtcccctgccttgttcttcttacagagtacaagctacctgatggctggccactagtctcctctgttgctttattttatatattaggccagtccaggaatagggtgaggcaagtcagatgctttccaccacctggagagtgagttccttaaattttgcactctcagtggcttgcttctccacctgagtcctggccctaatcaagcaaagaacggaagaatttgctttcattgatatcatcatctctagccttgcttggaggcccccgaatcatcaggcccttgggaaaagcaaaaaccaaaaccagataatgatttaaagcagagcttttcccaaatattgtgccacagttagggacagttgtccccagatattgattccatcagccctcaaagcatccaggcagcacccatggcaatcagaacccctaagccagtcggttttgaccttgagcagattctttcacgtactgtaatgtgtagggtaaccaaccatcccagtttgcttgggattttctcaattttagcaaagccccacatccctggaaactgttcagtagtctcaggatggtttggttactctaccaatgggccataccaaagacttcccagtactttcatttcctcatctttaaaaaggcggtaataataatgacctatttcacagggttgtgaagtgcttgcctggcccacagcaggtgcccacataagtatttactattattggcatcttctatgtgtgccgtgacaagagaaatcttgggaagcactgttctaagagttagtcatgcaggtgatacactagcaccatagaggcattgttgtaaacaaggtgtgaattgtccaacattcagaggttagtagaggagaagtcaaaattgataaactactatgaaatggacaagtacagtcatgacattatgaatcgcagggagagggtgggcgtggaataggatcatagaaagctgtttcaggaaacagatcaaccccctgatttatgaatgaggaatttgatctaggaaacaggcccagagagggtcaatgacttgtccaaagccacaagtcaagttagtgcagtgctgagaatagaacctgtgtctttgaaatacgaaaccactgtctgttccctatgctataatgtacaagcaacagagaatgggggggattttagtaagtcttcctggcgatggtggttttaataattggcaacaaaggctacaactgatgccaatctatctctggctagggccctaggactgccctccagcctgggttcatatgacttgtttctctggacaggtctgctcatgtctgctctcacggttttcatcctgattctatactttgtgattgacaactttgtgataaatcgcagaccatggctccctgagtgtactcccatctacatccagtactttgtcaagttcttcatcatcggcatcactgtactggtggtggctgtgccagaggggctgcctctggctgtcaccatctcactggcctactctgtgaaggtgagactagaacaatcctatctcttcctttaggatagagatgggagagaagggtaccatgtaacctttagtgaaaagataagccattctatcatctataaactttggctggtgcctcacaagagcagaagtccctggtattatggaaggaccatctctgtcagatgcatcaatgttgaaatgacccagcagaatcttaagagaatgacaaaaatggtatcttggatttttttttttttttaagacagagtctcattctgtcacccaggctggaatgcaatgatgcaacctccgcctcccgggttcaagtgattctcgtgcctcagcctcccaagtagctgggattacaggtgtgcaccaccatgcccagttactttttgtatcttttacagagacagggtttcaccatgttggccaggctggtcttgaacttctgacctcaggtgatctgcccgtctcagcctcccgaagtactgaaattacaggcatgaatcactgcacccagtcagtatcttggatttttgtgtgggactggaagatgaaatgtggagagatgttggctaggaaatggcctttgacctagatttaggagagtccagttagtccccctctcaagtcttttctcttctcctttgtagaaaatgatgaaagacaataacctagtacggcacttggatgcttgtgagaccatgggcaacgccaccgccatctgctctgataagacaggcacgttgaccatgaaccgcatgactgtggtacaagcttatattgggggcatccattaccgtcaaatcccaagccctgatgtcttcctgcccaaagtcctggacctcattgtcaatggcatttctatcaacagtgcttatacctccaagattctggtaagcatttcctttgcgtagacacttagagtgggtggttggaagggaacatccattttctctgaaatgaacccccttattgtttacactgcctaaattgccatcccacatcccatttctcacgctggagtgaacatgtttgggtgagactacagaaaaatccctgggagtcaatggagggttggaggtaagggcctgtaagaatctatggccaggaaataccctcccaattagcatgtaaaagcaatgtctctaaggagggaaagtagaaagtaacccaaagtagaattgggcttatcagaagtaaattactcactttctagaaacaagcatagtgtattagaataagacccacacaaggcgagacaccagcactaccactagagcaaactacaaaatccctaagccctggatggcacaaggatcacggttaccactgacccctctctgcctacccttgaaaaacaacaggctaggcatagtggctcacttctgtaatcccagcactttgggaagccaaaatggtaagatcgcttgagcccaggagttcgagaccagcctgagcaatattgtgagacctcatctctacaaaaataaacaaaattagccaggcatggttgcgcacctgtagtcccagctactccagaagctgaggtgggaggatcacttgagcctaagaggtcaagtctgcagtgagctgagatcacaccactgcagtcaagcctgggcaacagagcaaggtgctatgtcaaaaagaaaaagaaaaaagatgccaggtgctgtggctcatgcctgtaatcccaacattttgggaggttgaggtgggcagatcacctgaggtcaggagttcaagaccagcctggccaacatggtgaaacccggtctctactaaaaatacaaaaattagctaggcatggtggcaggtacctgtagtccctgctactcaggaggctgaggcagaagaatcacttgaacctgggaggtggaggttgcagtgagccaaggtcgtgccactgcactccaggctgggcaacagagcgagactccatctccaaaaaagaaaaaaaaaaatgttatttcccctatgagctccaggtatataatgtgaaggctttgtaaatgagttctttctccctaagttctctgccttgtcaaggcatcttactcaatagtgctgtgtatatttcttctcccagcctccagagaaggagggaggcctgcctcggcaggtgggcaacaagaccgagtgtgctctgctaggctttgtcacagatctgaagcaggattatcaggctgtgcgtaatgaagtgcccgaggagaagctctacaaggtgtacacctttaactcagtgcgcaagtcaatgagcaccgtcatcaggaatcccaacggtggcttccgtatgtacagcaagggcgcctctgagatcatcttgcgcaagtgagcacccccgaccactctgcttcccttcaagatcctctcctcaggaaggcatgggtgcacaccccacactgaacccatgtgaatgagggagccctccagccaggtggtgacataataactaatatccaagcgtctactcaggccacgcatgttttttaagtgcttaaggtggcttgttgtatttaatcctcacaactcagtaaggtgggtactatgattatccctgttttacagatgagaaaacagagatataaggaagttaagtatctcactcaaggtgatacagctaatagtggcacagccaggattcagacctggacgatcctaagtttccatttcctaatctgaaaacagagatagccatactcagctcctaaaagtactaccccctcactgtaactaaatgattcaatgtatgtaaaatgccttatacataacaagtactagaaacgtttgttctgtgttctcttttccttctctttccttcccattcccatttctgattacagggaatttacataactttaaaagtgactattcggccaggcgcagtggctcacgcctgtaatcccagcactttgggaggccgaggcaggcagaacacgaggtcaggagttcgaaaccagcccgaccaacatggtgaaaccctgtctctactaaaaaaaaatacaaaaattagccaggcatggtggtgcgtgcctgtaatcccagctactcaggaggctgaggcaggagaatcgcttgaacccagaaggcagaggttgcagtgagctgagatcgcaccactgcactccagcctgggtgacagagtgagactccattacaaaaaaaaaaaagtgactattaataaattacccatagttcatcaaaagttggcactatacctaagtagggctgaattaaccagtgctccaacatggctttagccaccttcttttaatcagcacattcttgtataggaaacctcccccaaaccaccagcaccacacagtgagcactattctaaatactcggattgaaaaagtctctctgccttcaagaagttcaaaagagcaggtgattcacaaatgacttgcattgcattcacatatgggtaagaacagatgacatgggagaatcccactctctatatatctagaccttaactccatccacagcccacctaccttggaaagagggactcagctgggtgatgaatgaaggaaatgtttggccacacttggagcaatgtctttaggaataatacagagttgccaaaatacctgtcaatgattgtagaaacgtattgagtgggaagggagacaccgcgttcttactgtgcgcctccccaggtgtaatcgaatcctggaccggaaaggggaagcagtgccattcaagaataaagacagagatgatatggtacgcactgtcatcgagcccatggcctgtgatggactccggactatctgcatagcttaccgggacttcgatgacacagagccctcttgggacaatgagaatgagatcctcaccgaactgacctgtatcgcggtggtgggcattgaggaccctgtgcgcccagaggtgagagggtgggaagccacccaggagtctcaggaagtggggtactagttccctttctagttgtgaccccaggcaggtaacctaactgcctctcacttagagggatagaagtttctgtgcttcctgcttcacaggactgctgtggagtgccagtatgatcgaatgtggcattcctaggactaatgctgtctgagtgttgagaagcaaagggcttattgggctcattatttggtacttaagtgttgtcaggaggtcaatttagccaggacaccaactttgtctttagctccctcctttcaatcaacacattctttttgagtacctgctgtgtgctgataactattctagacactaggggattgaaaagtctctgcttctaagaagtttagacagatggactattaattctcaaggcccagaggcatgagagggtgtcatgcatgtgggaaattacaaagagctgatatggttggaacatgggccaggtgggtggagagtggcaaaagcttctgctagaaaagaaagcactggccaaatcgcaaaatgccattcatgccctgccgagaagtctcaattgtaagtgaaagagcaagtttttacacctcactcccaaagcaaatttccccttcaactcatggtacaatagggcaaattcaaatgtgactgccgtgggtaggacagaagtgaggtggcacccaacagtatcaaaatgaccagacctagcccatgctgcatggcaccacttctagggtgcctttctcctgtctgccacaaagggacagacaaacagggacagcttaccagggtcatcaccctcatctgcgcctttcccctttcttcactctccataggtgccagatgctattgccaaatgcaaacaagctggcattactgtcagaatggtgacaggtgacaacatcaacacagcccgggccattgccaccaaatgtggcattctgacacctggggatgacttcctgtgcttagaaggcaaagaattcaaccggctcatccgcaacgagaaaggcgaggtgggtcctggctagggggaaccaggacctcacctgacaaggaaaaggcgggttctagcataaggcatctgggtcatgtgcgggaaggtgggtggtttctaaagtgaaagctattcgtagtgaaacatctccttgtaccaaactgctgatatggtaacattgggagttgccggctgggcgcggtagcttactcctgtaattccagcactttgggaggccacggcgggtggatcacaaggtcaagagatagagaccatcctggccaacatggtgaaaccccgtctctaccaaaaatacaaaaattagctgggcatggtggcgtgcacctgtagtcccagctactggggaggctgaggcaggagaatcacttgaacctgggaggcggagggtgcagtgagccaagatcatgccactgcactccagcctgggcaacagagcaagactccgtctcaaaaaagaaaaaaaaaagagggggggagttgcttgtgaatgaagcttgctagcttcattcacaagctatcttttgagacagtgtcactaacttttcttgtctttctgctttttcagttttttatactgacttccccctagcccacccctcctgtgtccctgccctttggctaacagtggctaaaggagaatgtggtctggcggtggcacagatccaagctttcctgagctacatagaaatcaaacctaagacctcagaagcaccactttacccacccgagccaacagccaaccctggcccacctcccattaaaggtctgggaaatgggggattggctgccaggtagggacttgggaggaaaaagaaaaaaagcagggcctgaatggtcatcatccatgaatctacccttggagactggttggctgtttcatctctgcttaatccagaataacactttcatgtgggactgtggtgtacccaatctcccagtgactccaagtgtatggagaagttaagattttcctggatagcttttctgcatttgactgatccaggtgtggtctggtgttggcaggtagagcaagaaaagctggacaagatctggcctaagcttcgggtcctggcgcgatcttctcccactgacaagcacaccctggtgaaaggtgaggttggcttccaaataggtgcctgcaacagctgaaggcaggccagggcgaggacagataagaaccaccagccaaagccactctcctgtccaaatagggaggtcctaggagagctcccaggctagtggggagaacatacagttagcaaacatctgagcccttggtgagtatgacacacaataaagttgttgggtttttattttttttattttttgtttttatttttggagaccgagtcttgctctgtcacccaggcaggagtggagtggtgcaatctcagctcactgcaacctccgcctcgtgagttcaagtgattctcctgcctcagcctcccgagtagctgggactacaggcgcatgccaccatgcctgattaatttttgtattcttagtagagacaaggtttcaccatgttgaccaggctggtctcgaactcctgaccccaggtgatccgcccacctcggcctcccaaagtgttgggattagagccgtgagccaccgcacctggcaattgcatgggttcttaaaaacatgatcatgtcttatttaccaatagtactgtgaactaggcagggcaggtattcccattttacaaatgaggaagtttgaggctgagaagacaagtaacttacccaaattacccagctggtacgtggaaatggtgcagtttgacccctaggtctctgccttgaaatccatcctatgtgttcttcatagctgtcttagggtaccggatgaggacaaacttagttcagtgctactcatgaaacaacttactgcccttaggtggttcctgtagaacttctaggaaagggaaaagggaaggaaagaagaaagtagaaggagtggcgggtggtaggaactgaagggtgggggagaccagaaaagctcactgtggtgtgtctgtttctcccaggcataattgacagcactgttggggaacaccggcaggtcgtggctgtcactggtgatggcacaaatgacgggcctgctctgaagaaagcggatgttggttttgccatggtaagctcagcacagtgtctctctgattgcaagctgccttctccatcaggaagccaggtccggcttctggttgcctgctgcttgctacacctgcatagcccatggggtgcttttttgtccaactccatctctcctatctaccgggccaatcatgatatatgtaactggggacccatcaagtatgaagaatagataagagggagggaagtcatgaagaatcatatgcaggaaagccagaccaacataaacttgcctataaacatgtgaggttgtcaactaggcaaactctagaagatttgtgttccctatggtaggcgctctgtgtggctggcaccattgggtattccgcttttcacttctgaggccaagagcatcagaatcacttggaaagttcatgtgaaatcacatgttccaaggctccacagttagacgtcttaattcagtaggtctgggatgaataccagaatttttttttaacaggcacaccagttaattctgatgttcagaaaggtttagaagccccccagattctatcctcacactcaagtagtttatgattataagcctcccatacagattgaactgttggtgatttttagcagtggaaggacatttaagaagtcatctatctttagagaactcttttttttaagggttttattctaggaaatttcaagaatatgcaaaaatagggagaattgacaggtacctgtcactcagcttcaactatgatcaacacatggccaatcttgtttcagtgattcccccccatttacatccccagtcttcagctgaattgtttttgaagcaaatgcaaggcatcatgtaatttcatccttaaaaatttcatggccgggtgcagtggctcacacctgtaatcccagctactcgggaggctgaggtaggagaatcacttgaacccgggaggcagaggttgcagcgagccaagatcacgccactgcactccagcctgggtgacaaagctagactctgtctcaaaaaacaaaagagattccccctcattgactatttgattactctgaggcgggcagatcgcctgaggtcaggagttcgagaccagtctagccagcatggtgaaaccccagctctactaaaaatacaaaaattagctgggcatgatggtaggcgcctgtaatcctagctactccggaggctgaggcaggagaatcacttgaacctgggaggcagaggttacgatgagccgagttagcaccactgcaccccagcctgggtgacagagcaagattccgtctcaaaaaaaattttcttttcattatatggggggatggtgtggggcaaaaaaaaaaatttcattatatgcctctaaataataattatatatcaataatctatatatctaaaagaatcttaataccattatctcagaacaaaatcgatgcttccttactatcatgaaatttctagtttgttcacattttcctaactgactcaaatgtttttatagtttatttgcccaaatcaggattcagataagatccataacttgcagttatttgatacatctgttaagtctcttaacctatctcttggagtgcgcctccttccagctgtaccagtagctgtactagctgtatagtaggtttctatacaaacccatagaatgcagattcacccactcaggccccaccccagatttactgaattggaaagccgggaactggggcccagaaatcttaattaattatgttaaatctgttaaatgtgttttgacaggctctctcagtgattctatgtaccctaaactttaagaatcactgatcttataggatctctatgttgggagtccccaaaaacacccctatattcatggggttgctaggaggactcatgggacttggcatatagttgtactcatgactaagattcataacagtgatgtagtaagaatacagttggatcataaaagaaaaagacaatggcagaatctggataaatctatttgcagtctttcttatgctctccctcccatgaggagtcaaacagagtccattctttccccactaatgaaaacacagaaatatatgtgtgatgttctgcctagggaagcccatcatggacttagtacccaaggtttttcttgaggctggtcacataggcaccttctgcctagcacataccaaaattccagactcccaaaaggaaagcaaatgttcaatgtaaaccacattgttcggacacagtctagacacaatgagccacctttatcagttagttgttgagggcaagcattctgagagcccatttcccagaagccagccaagggcccaccctgcaagcattccttcctaaggacagtcgtctcaggcctgctgtgttaactctcttttgcacaatccccctccatcttttttcctagcaacttagttttgaaggaagtgggttgtttgtctgcagagactatccctcagtatagattttgttgattatttcactgtgatttcctttaacgtattattttcttccttatatttcctataagcaagtagttggttctagaagttatcagattctagaccctttctttcattgagggctgcaaaatgacaatattgtaattctttatttattaacttaaatacttacataaaaagagattcccggccgggcgtagtggctcgtgcttgtaatcccagcactttgggaggctgaggcaggcagatcacgaggtcaggagttcaagaccagcctggccaaaacagtgaaacccgtctctactaaaaacacaaaaattagctgggcatgatggcgggcgcctgtaatcccagctacttgggaggctgaggcaggagaatcacttgaacccgggaggcagaggttgcagtgagccaagatcacgcctctgcattccagcctgggtgacaaagctagactccatctcaaaaaacaaaagagattccccctcattgactatttgattactctgaggttccaatcctacctgaaaggtaggtttttggtttgttttttaattactggttttttttaaaatgatgagttgactttttaggaacctccaaaggtgaccaatgagtggatttttttttaagtatcattacgaattcatagatttaagtatatttgatgtgtttcaatccactgctcttagtatggttttgatgctcaaagtgatccaccattaggcagaagaggcctcttcaacattgctgagtcctttagatacaaccccagttgtttttaatagctttcttggtttattcttggttttttcgttcttttttatcctggataggagatagtccatttctccaaggattcctgcttcattttaatgtgaaatggtatttattttatttatttatttatttatttatttatttatgagacggggccttgctctgtcacccaggctggagtgcagtggggcagtctcggctcactgcaacctccacttcccaggttcaaacaattctcctgcctcagcctcctgagttagctgggattacaggcagctgccaccaagcctggctaattttttgtatttttagtagagatggggtttcaccatgttggccaggctggtctcaaactcctgaccgcaagtgatccacctacctcaacctcccaaagtgctgtgattacaggggtgagccaccgcgcccggcctgaaacggcctcccaacactttgggaggccaagggggaaggagcactagagaacacaattggaactcaaaggtgttccttgctactgagtagatctttgtttctaagccttttcagtggacaaagctaagaagtatgctcttaagtctcacttgcttttgtgtttgttttgtgtttgctcacaaagagaaaatacttcgtgaattcatatttctgtttttcatttacttttagaattacatattttttattccacttttagaagaaataataattttttaaagaattatagatgtctaacttcctgatttataactttctaattttattttattttattttattttattttattttatttagttatttattttgagacacagtctcactctgtcgcccaggctggagtgcagtggcatgatcttggctcactgcaacctctgcctcccaggtacaagcagttctcctgcttcagcgtcctgagtagctgggattacaggcgtgtgccaccacaccctgctaatttttgtattttttagtagagatggagtttcgccattttggccagagtggtctcaaactcctaccctcaagtgatctgcccaccttggcctcccaaaatgctgggattacaggcatgagccaccacacccagcttctaattgtatttaacttccctgattttatgtttgtatcccttaagctgaaaattttgattcctaattgcattaacatgattattttttgttttattctaaaatatttcaagtagttacaaaatatcaataatattaataatacagttactctgccaaaaacaattaaatatttttctcatagttccttttatccataggtatatgctaccaggaatgtgccatcaaattattgtttttaagtcatttgtaacatttgtctgtgtgtgtgcagttgtgctaccaagtggctaccagatcatttatatcatgttactttccgttttggagattgctttttaggccagtgtggtggctcacacccgtaatcaatcgcaacactttgggaggccaagggagaaggagcactagaagccaggatttcgagaccagcctggacaatatagtgagactcccatctctaaaaaaaataaaaaattagccaagtgtgctggcacacacctgtcgtcccagctactcaggaggctgaggtgggaggattgcttgagcccaagaattcaaggctgcagtgagccaagatcacacctctgcactccagcctagatgacagagcaagaccctgtctcgaaaaaaaaaaaaaaaaaaaagcaagagagataaaatacatggttctaaagtcaaatgtacaaaacaaggtatattcatacaaatccggcttccaccctcattgcctttgccttgctgcttccctcttaattcaataggtaatttttttctgtcgtttttggtgtattcttctgtttgctcctttaaagtataatcaaatgcagtctgggcacggtggcacatgactataatcccagcactttgggaggccaaggcaggtggatcacctgaggtcaggagttcaagaccagcctggccaacatgatgaaacccctatctctactaaaaatacaaaattagcccgtcatggtggtgcgtccctgtaatcccagccactcaggaggctgaggcaggagaggagactcgcttgaacccaggagtcagaggtagcagtgagctgagatcacaccactgctgtccagcctgggcaacagagggagactctgtctcaaaaactataaataaataaataaataaataaataaataaatgtaatatattcatggcctgcccccttagataagtgataccataccatcaactcatttttctacctttctttcttcacttaccaacataacttagagattatttcataatagtaattataaagctgggcgatatagagagacccccatgtctacaaaaaatttaaaaattaaccaagcagggtgagcaaatgcctgtagtcccgttactcaggaggccaaggtgggaggatcattggagccccagatgtggagcttgcatttagctgagatcctgccactgcactccagcctggacaaagcaagaccttgtctcaaatttttttttaatttaacttaaaaggaaaattttgaacaaagatgaaattttggaactgtgctgccatactactactcctagaacaaatgcagagtttctcaaaggtgtcggaataacatgggcttaagtgagatactggcagtggcaacagaaatgtgagaatttggaggtagaatagacaggatttgctctctaccttttaattagtttccaaggttgagggagtaggaggggagggtgaaagggatatcaaagatgattgtaattcccagtctgagctcaacagtaaggttggtggcatcaggccgcagccctcctttctctagagtgacagtgacacatttgctctttgttttcttttgtgtgactagtgtgccctgtagtatttacactgacttcggaagcttcctggaggtcaggaaatggagcctgggctttatccactccctcactgttttccctcccatcttacctcagggcatcgcaggcacagatgtagcaaaggaggcttcagacatcatcctaacagatgacaacttcaccagcattgtgaaggcagtgatgtggggacgaaatgtctatgacagcatctccaagttcctgcagttccagctcactgtcaatgtggtggccgtgattgtagccttcactggagcctgtatcactcaggtgaagggggtgtgggtgggctgagacgggagggatgagtcaggggctaaggaacatggagtgaagactacggtgtgtttactgaagagtaaagacagcgtttccccatgacattgggacaggagttagctcttctaagtctgctgtcttcatctgcttatgtagatggtaacttacaggccttagcttagcacttatgtgtcagccactgtaataagcatttatatgcactatctgtattcttcaaaaatgaccttgtgaagtaggtattattatccccattttatgggtgaggaacttgaggctcaaggaagttaagtagctttctcacagtcactcagctaggaagtggccagattccaagtctaggtgggtcgtgggagctgggccatcgacagggcaaaggtgggctggtttcagagaaaagctaaaaggactggttcttctccccgccaggattccccattgaaagctgtgcagatgttgtgggttaatctgatcatggacacttttgcttcattggccctggccacagagccccctacggaatctctgttgaagcggcgcccctatggccgaaataagcctctgatctcacgcactatgatgaagaacatcttgggccatgcattctatcagctcattgtcatctttatccttgtctttgcgggtgagccactttgggggtgggtagcagctggggtcctggttggaggtgggggcagagaaagaaggtagcgtgagagcaagtgcacaggtcaggaataagcgcagcttcacctcccagtgcttgctgtgctcccgctacacggtgcattatgctactatatgtactcatacagtactcttgagtacagtgtgtactgtgtgtactcaagaatttcacaagggaggctttattatttctttctttctttttttttttttttttttctttttggagacagagtctcgctctgtcacccaggctggagtgcagtggcgctaactcgggtcactgcaacgtctgcctcccaggttcaagtgattttcctgcgtcagcctcccaaatagctgggattacaggcatgcgccaccacacccggctactttttgtatttttagtagagatggggtttcatcatgttggccaggatgggctcgatctcctgaccttgtgatctgcccacctcagccccccagagtgctgggattacaggcatgagccaccacgcctggcttatttctttttttacagattcaaaaaattaacctcaggtcccataatgagtacatagttgcagtaaaattcaaacctatgattgcctgactccagcgcacatagtcttactaccatgctgcactacatgagagcaagtatcaatgcagcaaactgagagagaaggtaaaataagtcaagaccagaactaacatttaaaatgtttaataactagtacaacaaaaaattagccaggcatggtggtgcacgcctgtagtcccagctatttgggaggctgagatggaaggatcacttgagcaggaaggtccaggctgcagtgagccatgatcatgccactgcgctccagcctgggtgacagagtgagaccctgtgtcaaaaaaataaataactagtgcagctcagatattgattaattagaatggacaccagccataagcaagcagtatatctgtaccaacacattcttactcttagttcagaccacacttaacctccagtgcttctcctctccccactaggtgagaaattctttgatattgatagtgggaggaaggcacctctacattcaccacccagccagcactataccattgtttttaacaccttcgtgctgatgcagctcttcaatgaaatcaactcccgaaagatccatggagagaagaacgtcttttcaggcatctaccgcaacattatcttctgctctgtagtcttgggcacattcatctgccaggtgagattctatctgcagttggggcaggagatctggaatgataaagggcagaagctgggagccagggttccctacatacctaggaaaaggaatgaaggaattacggggactggagctgtaagttgaacactttgggattcccaatctgctttcttttgcatattgctctagaattggagcccattgtgtcaagagctccagtgcagggcagcatgttgactggaaataaaataatacttctaaaatcctttcatgatctttctaaatacacagaaatttcacagaatgaccaaaagaagtattctcttctagtccctttctatggctcctgtcagcctatatgaaatgtgcatgcacatctagtatagactctccctgtccctgccctttgttctgaagggcttatgataaaaagtgttgtgcaactcaaagaaagagaagtaatgggatttgtacatgtatattacatagtcagcccagcttggactcctccaatatgagactatgagctgatcatgtcccatccctcagcagggcacctccctttatttgtccccatcctcaattcctttttttttttttttttaattttaaaaatacagatggggtctcactctgttgctcaggctggtctcaaactcctggcctcaagcaatcctcccgcctcccaaagtgttattacgcctgccattttttctttttgttttttttttcgtttgagacagatatctctctctctctctctctctctctctctctctctctctctctccctctgcctctctctctctctctcttttcccccctcccccagggggagtgcagcctcagtctcccaggttcaggcaatcctcccacctcatcctcagttcctaactccatcactgtaccttctccttgtcactaactggctttagtcacaagaagccaccagctcccctaactcctccagattgtctgttaatcatagtcacagtaactatgtctgtctccccatcagagtgctcttaaaggctgtttttgtctgtctcccctttgagatttcttcttttcccttcccctgcaagcaaatcgggacttgtacccaaggatcctgaggagtgggatgatgtggctttgggggccttggctggagggccagctgcctgttagtcatttccttgatggtgggctgcccctttctctgttctagattttcatcgtggaatttgggggtaaacccttcagttgtacaagcctcagcctgtctcagtggctgtggtgtctcttcattgggattggagaacttctgtggggccaggtgagtaccggcacaccctcctggtgcattctcacagcctgcagaactcccctcctctacatgagatggaacaagcaacggtggagaccccccagctcctcatcttcatcttctcctcttccctccccacccccactcaagttttcaagttcttgccatctcataggatctcaaggtggaatgatcacttcagaggtttcagaattcttctctaactaagcctggaggtagaaaaatcccttagcttggctgggcgcagtggctcacacctgtaatcccagcactttgggaggccgaggcaggcagatcacgaggtcaggaaatcaagaccgtcctggctaacatggtgaaaccccgtctctactaaaaatacaaaaaattagctgggcatggtggcaggtgcctgtagtcccagctactcgggaggctgaggcaggagaatggcgtgaacctgggaggtggagcttgcagtgagccgagattgcgccactgcactccagcctgggcgacagagcaagactcagtgtcaaaaagaaaaaaaaaagaaaaatcccttagcttctctgagacagaaaccaaacttttcaatggaattttgctacaaaaaaaaaatatataataagggtcttagaagtagaagagtttacaagacacatgtctttattctcatgaggcagcaacctggctatgggctgtcgagctgacataattcagggtttccagcctcttctctttcttgccatggctttatctgggtggaattcttaactcttacctgagataaattcagatttacaagatctctagagtagcagtatggcctgtggttcagagcatggactctgggaatgactgcctgggtttgaatccagctctctgtttttttttttttttttttttttttctgagacagagtcttgctctgtcacccaggctggagtgcagttgtgtgatctcggctcactgcaaactctgcctcctgggttcaagcaatttctcctgcctcagcctcccaagtagctgggattacaggcaaccaccaccgcacctggctaatttttgtatttttactagagacggagtttcaccttgttggctaggctggtctggaactcctgacctcgtgatctgcctgccttggcctcccaaagtgctgggattacaggtgtgagccaccgcacctggcccagctcttgttgcccaggctggagtgcaatggtgcaatcttggctcactgcaacctccaccctccaggttcaagcaattctcctgcctcagcctcccaagtagctgggattacaggcacccaccaccgcgcccagctaattttttgtatttttagtagagacagggtttcaccatgttggctaggctggtctcaaactcctgatctcaggtgatccacccgccatggcctccgaaagtgctaggattacaggcctgagccaccgtgcccagcctcagctctcctttttataagctgaatcatcttgggcaagttacataaccaatctgtgtctcagtgtcttcagcttaggaaaacaaggtcattgttaattagtgaatcagttactatacagtaatgaataatgtcttattccttataaataatcaaattttaaactattacgattataatagtatcattaagtctaatagtttcacttcttccttaataccactttacaaacctccctcatcctcagctctggcctgggctatacctctctttacagaccccaggtctctgcagataatcccttagtgtccagccacccaggtaatggacactttgccctaactggcctcaaagagccatttctggagctgcaggccttctcccctaaacctgctagttatttatttcatacctagatgcctccctgaataatttctttttcttttcttttcttttcttttttttttttttttttttttaagagatgggggtctcaggccaggcgcagtggctcacacctataatcccaacactttgggaggctgagtcgagcagatcacctgaggtcaggagttcgagaccagcctggccaacatggtgaaaccctgtctctactaaaaatacaaaaaaaaaaaaaaaaaattggccgggcatggtgacacatgcctgtaatcccagctacttgggaggctgaagcagaattgcttgaacccgggaggcggagtgcaatgagctgagatcacggcactgcactccagcctggatgacaagagtgagactctatgtcgaaaaacaaaaaataaagagattggggtctcactatgttgccaggctgatctcaaagtcctgggctcaagcaatcctcctgcctcggcctcccgaagtgctgggattacaggcatgaaccgctgcacccagccctccctaattaatgtctgacccaattccctccaccctgttctgtttggtgaagatttctttttttttttttttaccaatgggttcctaaagcagttttatgctttggtaaagcttggttgttaaacctgttgtttgaaactctgttctggctcttgcctcacatgtggccatgtggccttgctgccagacagcagccttccttctgtatcacaacagctttttccacattcagaggcagagctctggcattcttcccatttcaaaacccttgactccatatcagattgcccatacagtccctcttccccacatgagccctggctactccttatcttgtccggaaagaactgactgacaggtgctgagctcaccgggaaatttatttcaaatttcaaaccctatgtactgctccttgtcttctgataatactcatgtgacccctcttctatggactgtcccatccacttcctcacctcaagcccaagaaaacttttggtatcctttcacaagagtttgtaacacagaaactactttgcatgtggcaactaagaaaggggtcattcatttccaatacccttctcaaccccttgcctatacataggcaatatcaccatcttctccccaaactcttttcccccaggtcctggtctctgtttcttcctactgcgtaccatgctgtatagttctgttaaccttaaaagacagattgcaaaatggaacagaagaaatgagacagaaagaggaaaatgaagtatatgaccaggcagatggctggtcaattactagaatagaagctctcttttgtgtgtgtccataaatacagaaaaccttcctaaaagcctgaccgctggtgggcacttggagaatgcttgcctggatggattggtgcttctgcccactgctcttccagtgggaagggtggtagggcaaagagtaacctgcccaagggcctggctcatgtaagttgactgacagctcttctcacgctgattctgacgtcttcctcttcgctgcgcttgttttcagttcatctccgcaatacctacccgatccctgaagttcctgaaggaggctgggcatggcaccaccaaagaggagatcaccaaggatgccgagggactggatgagattgaccatgctgagatggagctgcgccgaggccagatcctctggttccggggcctgaaccgtatccagactcaggtactctgatagtggtctgtccttcccttgggagaagcagcttcccatcttggaaggtgttgggagggtagcagttcttgtcggccagcatctcttcccttccaaaggctcactactgatgggcagccctagatcctcagcttcaggacagacacgcaaaaggatctgtgtggggtcctctgagaggagaggagtcaaatgacctagaccatgggacactattagcatagtcctttagctctgggttgaccctaaagcccagcctgccaccctctatcaaatgggcaagcttcagcataaggtctcttgcaagcactagacctgaccccagggtgggaaatgctcagtttttccctacccttcagaaggaaggagttagacaatatcaatatgccaacatacccagcattcacttaatatagcttcctcacactgccattataggaatagatgctatctggaagggtctttgtaaaagaaactcaccttgttatatctcccccattcaaagtgtaaggccatggtggggaatctgatggtttcatgtgtaaaaatgacaatagtctcttgatgtctgagcatcttttgcaggattcagacttgcttcctgacaaggaggaagcaataatttcttcaagcctcttcccttcttgcaatttctgaaatgggatagaagccacccctgctgctcttatgtcccctgtctatagccccacaataacttttattttttccactttccatgcatcaattgtaactactttctcctgggtgaatgcgctgatctaagcattgataattctgtcttcccctgctctcaccccccatagctttattgttttaatcctgagattttccatttcaaaaacactgtaaattccaagatctcaagggtggtctccagaaaacaggcgtatttctctctgctgattggctagagatcttcaaaataagtttcactgtctaaaactggccttgcaaatgttttagaaagttccccagtcggccaggcatggtggctcacgcctgtaatcccagcactttgggaggccaaggtgggtggatcacctgaggtcgggagttcaagaccagcctgaccaacatggagaaaccgcgtctctactaaaaatccaaaattagccgggcgtagtggcacatgcctgtaatcccagctactcgggaggctgaggcagaagaattacttgaacccgggaggcagaggttgtagtgagctgagattgcgccattgcactccagcctggccaacgagagctaaactctgtctcacaaaaaaaaaaagactgggcgcggtggttctcacctgtaatccagcactttgggaggccaaggcaggtggatcccctgccttaggtgaaaccccgtctctactaaaaatacaagccaggcatggtggcacatgcctgtagtcccagctacttgggaggctgaggcaggaaaatcgcttgaacccaggaggcggaggttgcagtgagctgagaccacaccattgcactccagcctgggtgacagattgagagttgtctcaaaaaaaaaagagaaagaaaagaagttccccagtcaatcccacctcgttagtgtataggagagatagatggagtgaatattctaaactatatacctggtaggaacttatcccctataggcaagacaacaaatagaaaagtggaaaagaggccgggtgcggtggctcacgcctgtaatcccagcactttgggaggccgaggctggcagatcataaagtcaggagttcgagaccagcctggccaacatagtgaaaccttggctctgccaaaaatacaaaaattagctggacgtggtggtgggcgcctgtaatcccagctactctggaggctgaggcaggagaatcgcttgaacccggaaggctgaggttgcagtgagctgagatcgcgccattacacaccagcctgggcaacaaggcaagactctgtctcaaaaaaaaaaaaaaaaaagaagaagaaaagtggattgcagactcactatgcacctgactgtacttccaggcaggtgctttttctgtctgccagagaaacattccagggtgctgtggctgcctcacctatccagggcgatgcagctccctggggacacaggtgcttcctggggagccctgagcacttctccgtgttgctggcctcacatccaattgggcaggcattggagtccgggcactgcctggagctcaccagaaggtgctttacagtggtccttggtttgtctctcagagggcttggtcccctctgctgtgaggctggactgcagctgtggtggcaagtgaccagatgtcactgagcagcctgaccatggtctaggtggtgcttggatgcatccacttggcttcctttggtcattgagtttcaagaagagaaactccaggagacggcttggccaggatcaggcaaaaacaatcatgccgaaaaagtggcagaaaagcttgaaggtctctcagtgaaggaggagaccaaggaggatgctgaggagaaacaataaatcgtcttattttatttccttttcctctctttcctttcctttttttaaaaaaaaatttaccctgcccctcttttttggtttgtttttattcttttgtttttacaagggatgttatatgaagagctgaattaaaaaaaaaaaaaagaagaaaaagaaaagtggaaaagggctaggtagggaaacgctagggttccttttccctctctcaagttcctcctctcagaaagaaaatttccagcgggacctacacaaagtgcctcgtggcatccaggcatccagaatccccacgctcactccctaccccaccccacactccaggctgctgactccaagtacccatagaacctggcgcctttggctcccatctctaaagcccccagtgctttcctttgggtctgctctttccaaaataacctgtctttgctttgtttttcttcaggatcaaccacttctactatgtgatttcttttctcctagccaagattccctcagtccagtacctccttgctcctttccagtcttctgtcctgggaggctgagatttatgggtcttccttgccctccactaccaatttctatttccttgactatgcccctctctacaaggtctttttggtttcactgcctacatagctttaggtatactacctttccgcattgttggagcatgaggcagttgggccaaaatggcattaaagcctaaagtgaggcatgttcaagatgccacagtgaccaaattcacgccatccaggatgcacctgactctggaagctgatgaggctaatgatgctaacgtgtatcctggatccctgaggtccgctcccaacatcagcccttcagcctcagctgggttctaacaaaaccccctgccacctccacgttgatctttgttgtcattctcatcgcagtgctttggtatgggaggtgttagaaaacttagagactagaattgtggaggttgggaccttgtaactccaataagcactgaagaaggtgtctctacagtcccttcttccatggagctggaacccccgcacccaccccaagtgtaaaccctctcctcctgcaggttcaagctcctcagtcccagggaactaaaactgaataatgtgaggaagcagtgatgtttctgctcaaactgtgatctggatccagaaactagccctaaacagctcatggcttctcaggaagctttataaaaggactgtctcactcacattctgcctactttcccatcttccctcctgggaaaatgaagtccagttaatggaatcagcacctttccttcattcctggtagattaacccttggcattaagcagatagatatttctaagattattctaccagattcatgaaggctaaagggaattccttttgattttgtccttgttacttaggggtcagggataaggatggtagagttgattgaggccctagatcaggaccattgtcagaaaatgaatggcatggccgggcgcggtggctcacaccttaatcccagcactttgggaggctgaggaaggcaaatcacaaggtcaggagttcgagaccagcctggccagcatggtgaaactctgtctctactaaaaataaaaaaattagctgggcatggtggcaggtacgtgtagtccctgctactcaggaggctgaggcaggagaatggcttgaacccagcagatggaggttgcagtgagccaagatcgtgccattgcactccagcctgggtgacagagcgagactctgtctcaaaaaaaaaaaaaaaaaaaaaggaaggagggaggaaggaaggaaggaagctgggcacagtggctcacgcctgtaatcccagcactttgggaggccaagaccggcggatcacgaggtcaggagattgagaccatcctggctaacacagtgaaaccctgtcactacttaaaatataaaaaattagccagcctggtggcgggtgcctgtagtcccagctactcaggaggctgaggcaggagaatggcgtgaacccgggaggcggagcttgcagtgagccgagatcgcaccttgcactccagcctgggtgtcaaaaaaaaaaaaaaaaaaaggaaggaaggaagaaaatgaatggcattaattgcctctgtctctgaggaacagggcactgaaaaccagaggctacttgtgtaagcctcgacctgtagctgtttcaaccaccaccaaccaaaacctcttcctccccctccctcagtctaattgccgagttactgtcagcatttctgccagacatttcagatctctaatgcattaatgcacttagtagcattctcgatagtgggcttggccactgggttcttgagctccattctcagggagcctacctacttcagcccagggaagggatagctcagacaagatacccagaggaggatgagcccagcaactcatggcccaggggtctttccatcatggccatttgtatattggctactaaatggcccctgttttttatttaaacacatgagttattttcctggaaaatccgcaaaaatacgtagtcggtttaattgatttagaggttcctgagccttcaaattcagtaatacataatttgccttcagaatcttcaattgtttgccttatttttaagagtacaggtaaaaaggggcctgtaggtggaggttgcagtgaaccgagagtgtgccactgcactccagcctgggcgacagattgagattccatctcaaaaaaaaaaaaaaagtacaggtaaaaacaacgaacaatcgctgtctagctgttaggagtgatggagtagggaaaagtccctttacattttaaatactcttggccccctctaaacctcaaatgcccactgtggattcaaagggaagaaaaaactagattctggctgggcgttgggactccatggcaaattgttccctaagtgaagtatgatatgcaattaacgtttttctccttctcctcaccattgctttttgtgggagggaagctctctcttgctctctcctgtccccttttcccatctacttccattcctgcttccccaaccttccatgaccctcccttcctctttcttcacctctctcggactgactgtggagcaaagctgtctcactctctgattctttgcagatcgacgtaattaacacattccagacgggagcctcttttaagggagtcctaaggcgacagaacatgggtcaacaccttgatgtaaaacttgttcctagttcatcctatgtagcagttgcaccagtcaaatcttcccccaccacttctgttcctgctgtttcatctcctcctatgggcagtgagtgatagtctattatgatgcatgatttgctaaaatgaccacaagagagcacgtggcatccactttaaccaaccatggttatcttttccttttggtttttccctttgatattttgacttaagggaagaaaaagacaaaaatcctactctaaaaccagactgtgtgcccttgtattttatttttgtaatgtagaaaagctattaaaccttaactgttttaaagacaataattctgttttctgattgttcctctgcattgctcatttcttccttttcttgagttttgttttgttttgctttgccttttttgtttgtctgtttgttgctttgctgggatatgttgttgttcctctcttctcctcctgctcctttgagtctgaactctacctcctaagcttagatgtgaggttaggccagaggaaaacccaagagctttctttacatgggggcaaagtttgggatcttttgaggaaaggtaggaagggagctaatgtgcccatgggtgtgttttgactagtggacctgtcataattgagccagtattaaacttggtcaataataatagtccatttggccaccactgtattgctgactggcaattttagcataaaagttgtagctggctgggcacgatggctcacgcctgtaatcccaacactttgggaggccaaagcagatcacgaggtcaggagatcaagaccatcctggctaacatggtgaaaccccgtctctactaaaaatacaaaaaattagctgggcgtggtggcgggcacctgtagtcctatagctactcgggaggctaagacaggagaatcacttgaactcaggaggcggaggttacagtgagccaagtggagagccactgcactccaccctgggcgatagagcaagactctgtctcaaaaaaaaaaaaaagttgtagctataggtgaagaaaagaaagtagttcagttcaaatgtatatggttgaacatccccgttattttacttttctgggactccggtttaaaaatcagttaatcttggctgggtgctgtggctcacacctgtaatcccaactttaggaggccgaggtgggcggatcacctgaggtcaggagttcaagacctgcctggccaacatggcgaaaccctgtctctacaaaaatacaaaaattagccgggcaatatggtgcgtgcctgtaatcccagctactcgggaggctgaggcgggagaatcacttgaacccgggagtcagaggttgcagtgagccgagatagcaccattgcactccaacctgggctacagagtgagactccatctcaaaaaaaaaaaaaaaaaggccaggcacagtggttcacgcctataatcccagcactctgggaggccaaggcaggtggatcataaggtcaggagttcaagaccagcctggccaatatggtgaaaccctgtctctactaaaaaatacaaaaattagccaggcatggtggcacgtgcctatagtcccagctactcaggatgctgaggcaggagaatcgctggaacccaggaggcggaggttgcggtgagccaagatgctctactgcactccagcctgggtgacagagacagactccatctcaaaaaaaaaaaaaaaaaaaaaaacgaagaaaaaaaatcaattagttcacatgaaggtacgagaaatatacaaaagagtcaaaataacattttttcttcatttactaaacttttaggagtttctgaagaggagtgccttttattttgcttctccttttctctagtttgattgtttcaccaatagccagcacttattttgcacataaagtttcaggaagccctttctcagccggacttgcaattggagtattatcaactcacaacctaagatctggtgttcccattggtagattcttggattcttgctaatgcttatgtcttcctattcctggtcattttcccttccccaaatgggactcagagaggagagagaaggtagccagctctttgctgataatgtgggaaggagtttatctgtattaaatataatgtgggtttcaaatagctgagtgttcagtctgttccttcctcccccattcccaacctcaccaccccccaccccgacctctgcaaaggggctcaagaaagaacagttgccttgtctgtggttcacatgatcacggactgtgtgggttgaccagacttagatttgttttgtctctttagccaaagtgttctgatgtgaggaatgggggtggaacttgatagagatacatacaatttctttaggtcaaaaaaacaggcaagaaagaactcactaagtcttgccctgcaagtatccaggaacctctcccaccagttctttcatattcctctcttaattccttttttccttctagttctgccatccccttctaactagcttctgttctgttttaatcatccctttctgataggaagggttagtgtcagatatcctgatggtttgatggtggaaggagactaagtagaagactaagcagaagactgggatcttgtagagcagctggtagagggtgtgctccaaatcctcaaagactagatcagaggagagacaggccacacctgctctttctccagctgtgcctttttagttggagctcctagaagttatagccatacattttaaaaccctctttcccattccagatctccaaatgaattcaactgtttgtccaaccttcattagatagatctctaagatttccctgcatagggaggccctaatccttttcttctggtttctgaaaagagcagaaaactgcctggcgcggtggctcacgcctgtaatcccagcactttgggaggccgaggcaggtggattacttgaggtcaggagttcgagaccagcctggccaacatggtgaaacctcatttctactaaaaatacaaaaaaaaatagctgagtgcggtggcgcacgtctgtaatcccagctactctagaggctgaggcaggagaatcgcttgaactcgggaggcggaggttgcagtgagctgagatcacgccattgcactccagcttgggcaacaagagtgaaactccatcccccccaaaaaaaaaaaagcagaaaactacagaatgagaaaatggagtcttcacctgcccactcattgagctgcagagagtagccctcagcactcatacccagtctcctgagtcatgaaaagagttgcccttcaaccagccacttccacctgtaggccagggccccaaaagagacatttccccaaggttttgagaaatgatgaccaggaagggaagggttgactggctgtgtggagagtgctcaaagctttccctgcaccttcttcactagccctgtcttgtccccatacactgctcatgcaccaggcatcatgctccaggaaggggagatgccagccctgggtggattggtggtgatatagtgcatgattgttcatcagcatgtgttctctgaggccagtgctggagttggggcatcctggcacagccccatgccctctcctccctcacccttctctccacccaccaagccagctggtgctccctagctctctgacccctcttcacgtgagcttccttacaggtggctggtttccctttagattccagaagtcctgcagtctagctggatgactgtttcttgctccccaaaagacatttcccatattttttccatctacccatccccaattcacttttatcttcctcattgtttacctgtaacagtattattggtcaccccaacaggtgagaggaaaagccaacaaacagggctccagaccctcactccaaccccagttgttacaaatttattttctatagtggacttcacatgtaattttttccaacaaagtattcaattgaatggaagcaggaaattgaaaatcactgatattgaagatgatgtactggcggataaaggcacctgccctcctgtaatattcagtagaaattttgagatcttgaaaacatatgaaaaatgtgggctatgttatcactcctgacagtgatggctttgatggagtgggatgactttggacccatctcttggccagtgtatctgtgccagggtcaaaggagaaggcactgggtttggactcactcaatccaaattgccttgctctgagattttatgtagatcagtgaaaacttgagacttcctgaagaccagatggagcctccattccatctgatctcacctagatctggagcaaaggcaacatgataggtaaaatttgcacatcagatggtcaaataggaatcagataataaaaatgtggtcctcgctgtctgttcagcatggtgagtgtgtgcctgtgctccctgattcttcttggctgaggtgttgagctgatactgttgagtggcaaggagtcctttgccttctgagctttgagcaccctcagtcttgggtgggtctgcaggctgtagtagagtgggacgagataaagaaagccttagccagcagagacacattctcctccagagaaaacggaccaacagtattgatagtgagccttctttgagtggtatttatgaaggttctgtatggtggtaggaagcactggaacaggtgatccaaccagtttatttggctgactctctgtatcctctgctgtctccaaattcttgtgtcttctcctggaatatatttttggttaaacagcagaggaatgaaagaggtaccctacccccaccttcatcactcctacccctccaacctcaacagtttcccccacattactcccatttcttttctgagtgaagattttttggacaagactaggatcagccaccttccaacaactagaaccgtcctacaaccatttacctttcccctggcccctctctccaacttctcggagctccaaccctctccccctaccccaattctaccatccctgattctaagccacgcctcagagagacctgcagttcagaaaagcagagctgccaaaattgctggtgcctgtggacaagcaaaagctgttcacaggcatcaattattgtcagttttttcttgatgactctgaactgaccgaatcccttcctttttgcgcagtaagacagagactatgacactgggcaatgcatctccttttgcccagtaaaaccgcacgtggtttcctttccttcatcctcttcatccaccccatcagaaaggccacttgtttgtagcactgcctcctggattaggtttctctccctggtccctttcattcccttctccacataagactatgctcctcttcacaatttggaaacagctagagaaagcagcatgattgggcacagttgctgtgtatcagagacatgaacgtgcatttgaattatgagagccaggtcttttctcaataggcaggaggaaggcatcttttgacacctgtattttatctgctgcttctagggaaggggctgaaggagtgaagttctgtgttatttgcggggaggggacacagtggtggttgtgggatataaaaatatgcatgtttcctggctgaaagggcaaattattattagagagttttaagttcctgcatgctgctgacacaaatgaagattggtttgtctgcctggctgcacagttttcatggtcactcgtcacccaacctgtattatgtgcagattggtgtatgctggctctttgaggtctttaaacagataactaaacctcaatgcataatttttccattccacattcacaaaatgtttggcctcagcacagaaatccacatatctcaatcatctttttaagtttggctatgaatttgcatctagttcccatgtccttgccctccatctaaaagaactaatgaaacttcttgttttctgtttcattttaaaagtagattgtttgggaatgctaacgttgctttgggttttctactttttttaatgcagctttcaaaacgtcctagttgccgtcactcaccccagcccaccccactgcttgaaagttgagccatgtgatgtttctagtgccccatgatctcttctgatgtgtgtttggttttgatgctgagcagtcatgttttatagtctgggttttgtttctctcctaaatccaccatctccttgttctgccggccaattctcacctctctattttctcatcctccttttccttcccctggtatagatcaaagtggtcaaagcgttccatagttccctccacgaaagcattcagaaaccctacaaccaaaagtccatccacagcttcatgacccaccctgaattcgccatagaggaggagttgccacgaacaccactcctggatgaggaagaggaggaaaatcctgacaaggcttctaagtttgggactagggtgctcctgttggatggtgaggtcactccatatgccaatacaaacaacaatgcggtggattgcaaccaagtgcagctcccccagtcggacagctctctacagagcctagagacatcagtttgaattttctttctctgactctcatccctattttacctatttccattttcgtctatcccatctatgaggtgatgatgggacttttcattgtcacgtcagctgctgtgttaacagcagtgtgtgtgaagtgaacctctacctgaccatgaagaggcaagagcacagacttacaaggatttcaacttaagcttgacttggggtttgtagcgggacccagtcaaaccccattcaggtcatggtagaatctactccttggtagtcacttgtcatttttaaagaaatgatgacaatcctcttggcatcaccccaccccacattctccccgatgttcctctcctgaattctggattttgtcctacaagtctgtgccatttataagctaagttgagggttcagagggagacaaatatccccaagtgaaatatgttgcggtagagatggaatgtataaaatccgccagtagtgtgattgtttttcaatttttcccactttgaaaacttacacctaaaggcctgtaggcctctaactctttctgccctttcattcaaacc

SEQ ID NO: 1784 - DNA, 4671 bp, Homo sapiens
gcttagactgggtacctcttgcccttgcagatgctggatacttatggctgctctaatggtttctttttgtctatctttgaacctttattccagagatccagttgtcatcggtatccaggaagctctcctcttcctcctcctgacgtctactactacagttgctggttgttgctaaggttgctgccatggtaacatgcacatcctgtttacaccttcatctgggcaagttggtctaagctaggaacctacctaccctggacaactactatcatcaccacctggggacaccaatcatcgtgacacggagtccaccttccactcagttcccccatcctcttcctcctctcgctgccagacttcatacggaagaaaggatctagacttcggacggctactcgggagcttattgcacaagatatattcaatctattccctcactgggcccccagagaagcaagaagtaggaagaagttgagacagggaggcaggagacactggtcagttgaagggaaacgctacatcttctctggttgaggggcttggtaacagcaggcaaaatgacgaacccatcagaccgtgtcttgcctgccaactcgatggccgagagccgtgaaggggactttggctgcacagtaatggaactgaggaagctcatggagctgcgttcgagggatgcactgacccagattaatgtccactatggaggtgtacagaatctctgcagtagactgaaaacctcccctgtggaaggtctgtctgggaaccctgcagatctggagaaacgtaggcaggtgtttggacacaacgtgatcccccccaaaaagcccaagactttcttagaattagtgtgggaagctcttcaagatgtcacgcttatcatcctggagattgcagccatcatctccctggtcctgtccttttatcgccctgctggtgaagaaaatgaactgtgtggtcaagtcgcaactaccccagaagatgaaaatgaggcacaagctggctggattgagggggcagccatccttttctcagtgatcatcgtggtgttagtgactgcctttaatgattggagcaaagagaagcaattccgggggctgcagtgccgcattgaacaggagcaaaagttctccatcatccgaaacggtcaactcatccagctccctgtggctgagattgtggttggtgatattgcccaagtcaaatacggtgatctgctgcctgcagatggaatcctgatccaagggaatgatctgaagattgatgagagctctctgacaggggaatctgaccatgtcaagaagtccctggacaaagaccccatgttgctctcagggacccatgtcatggaaggttctggccggatggtggtgacagctgttggtgtcaactctcagactggaatcatccttactctcttgggggtcaatgaggatgacgaaggggagaaaaagaagaaaggtaaaaaacaaggagtccctgaaaatcgcaacaaagcaaagacccaagacggagtggccctggaaatccagccactcaacagccaggagggaatcgacaatgaggaaaaggacaagaaggcagtcaaggtgcctaaaaaggagaagtcagtgctgcagggcaagctgactcgcctggctgttcagattgggaaagccggtctgctcatgtctgctctcacggttttcatcctgattctatactttgtgattgacaactttgtgataaatcgcagaccatggctccctgagtgtactcccatctacatccagtactttgtcaagttcttcatcatcggcatcactgtactggtggtggctgtgccagaggggctgcctctggctgtcaccatctcactggcctactctgtgaagaaaatgatgaaagacaataacctagtacggcacttggatgcttgtgagaccatgggcaacgccaccgccatctgctctgataagacaggcacgttgaccatgaaccgcatgactgtggtacaagcttatattgggggcatccattaccgtcaaatcccaagccctgatgtcttcctgcccaaagtcctggacctcattgtcaatggcatttctatcaacagtgcttatacctccaagattctgcctccagagaaggagggaggcctgcctcggcaggtgggcaacaagaccgagtgtgctctgctaggctttgtcacagatctgaagcaggattatcaggctgtgcgtaatgaagtgcccgaggagaagctctacaaggtgtacacctttaactcagtgcgcaagtcaatgagcaccgtcatcaggaatcccaacggtggcttccgtatgtacagcaagggcgcctctgagatcatcttgcgcaagtgtaatcgaatcctggaccggaaaggggaagcagtgccattcaagaataaagacagagatgatatggtacgcactgtcatcgagcccatggcctgtgatggactccggactatctgcatagcttaccgggacttcgatgacacagagccctcttgggacaatgagaatgagatcctcaccgaactgacctgtatcgcggtggtgggcattgaggaccctgtgcgcccagaggtgccagatgctattgccaaatgcaaacaagctggcattactgtcagaatggtgacaggtgacaacatcaacacagcccgggccattgccaccaaatgtggcattctgacacctggggatgacttcctgtgcttagaaggcaaagaattcaaccggctcatccgcaacgagaaaggcgaggtagagcaagaaaagctggacaagatctggcctaagcttcgggtcctggcgcgatcttctcccactgacaagcacaccctggtgaaaggcataattgacagcactgttggggaacaccggcaggtcgtggctgtcactggtgatggcacaaatgacgggcctgctctgaagaaagcggatgttggttttgccatgggcatcgcaggcacagatgtagcaaaggaggcttcagacatcatcctaacagatgacaacttcaccagcattgtgaaggcagtgatgtggggacgaaatgtctatgacagcatctccaagttcctgcagttccagctcactgtcaatgtggtggccgtgattgtagccttcactggagcctgtatcactcaggattccccattgaaagctgtgcagatgttgtgggttaatctgatcatggacacttttgcttcattggccctggccacagagccccctacggaatctctgttgaagcggcgcccctatggccgaaataagcctctgatctcacgcactatgatgaagaacatcttgggccatgcattctatcagctcattgtcatctttatccttgtctttgcgggtgagaaattctttgatattgatagtgggaggaaggcacctctacattcaccacccagccagcactataccattgtttttaacaccttcgtgctgatgcagctcttcaatgaaatcaactcccgaaagatccatggagagaagaacgtcttttcaggcatctaccgcaacattatcttctgctctgtagtcttgggcacattcatctgccagattttcatcgtggaatttgggggtaaacccttcagttgtacaagcctcagcctgtctcagtggctgtggtgtctcttcattgggattggagaacttctgtggggccagttcatctccgcaatacctacccgatccctgaagttcctgaaggaggctgggcatggcaccaccaaagaggagatcaccaaggatgccgagggactggatgagattgaccatgctgagatggagctgcgccgaggccagatcctctggttccggggcctgaaccgtatccagactcagatcaaagtggtcaaagcgttccatagttccctccacgaaagcattcagaaaccctacaaccaaaagtccatccacagcttcatgacccaccctgaattcgccatagaggaggagttgccacgaacaccactcctggatgaggaagaggaggaaaatcctgacaaggcttctaagtttgggactagggtgctcctgttggatggtgaggtcactccatatgccaatacaaacaacaatgcggtggattgcaaccaagtgcagctcccccagtcggacagctctctacagagcctagagacatcagtttgaattttctttctctgactctcatccctattttacctatttccattttcgtctatcccatctatgaggtgatgatgggacttttcattgtcacgtcagctgctgtgttaacagcagtgtgtgtgaagtgaacctctacctgaccatgaagaggcaagagcacagacttacaaggatttcaacttaagcttgacttggggtttgtagcgggacccagtcaaaccccattcaggtcatggtagaatctactccttggtagtcacttgtcatttttaaagaaatgatgacaatcctcttggcatcaccccaccccacattctccccgatgttcctctcctgaattctggattttgtcctacaagtctgtgccatttataagctaagttgagggttcagagggagacaaatatccccgattgtttttcaatttttcccactttgaaaacttacacctaaaggcctgtaggcctctaactctttctgccctttcattcaaacc

SEQ ID NO: 1785 - protein, 1197 aa, Homo sapiens
MTNPSDRVLPANSMAESREGDFGCTVMELRKLMELRSRDALTQINVHYGGVQNLCSRLKTSPVEGLSGNPADLEKRRQVFGHNVIPPKKPKTFLELVWEALQDVTLIIIAAIISLVLSFYRPAGEENELCGQVATTPEDENEAQAGWIEGAAILFSVIIVVLVTAFNDWSKEKQFRGLQCRIEQEQKFSIIRNGQLIQLPVAEIVVGDIAQVKYGDLLPADGILIQGNDLKIDESSLTGESDHVKKSLDKDPMLLSGTHVMEGSGRMVVTAVGVNSQTGIILTLLGVNEDDEGEKKKKGKKQGVPENRNKAKTQDGVEIQPLNSQEGIDNEEKDKKAVKVPKKEKSVLQGKLTRLAVQIGKAGLLMSALTVFILILYFVIDNFVINRRPWLPECTPIYIQYFVKFFIIGITVLVVAVPEGLPLAVTISLAYSVKKMMKDNNLVRHLDACETMGNATAICSDKTGTLTMNRMTVVQAYIGGIHYRQIPSPDVFLPKVLDLIVNGISINSAYTSKILPPEKEGGLPRQVGNKTECALLGFVTDLKQDYQAVRNEVPEEKLYKVYTFNSVRKSMSTVIRNPNGGFRMYSKGASEIILRKCNRILDRKGEAVPFKNKDRDDMVRTVIEPMACDGLRTICIAYRDFDDTEPSWDNENEILTELTCIAVVGIEDPVRPEVPDAIAKCKQAGITVRMVTGDNINTARAIATKCGILTPGDDFLCLEGKEFNRLIRNEKGEVEQEKLDKIWPKLRVLARSSPTDKHTLVKGIIDSTVGEHRQVVAVTGDGTNDGPALKKADVGFAMGIAGTDVAKEASDIILTDDNFTSIVKAVMWGRNVYDSISKFLQFQLTVNVVAVIVAFTGACITQDSPLKAVQMLWVNLIMDTFASLATEPPTESLLKRRPYGRNKPLISRTMMKNILGHAFYQLIVIFILVFAGEKFFDIDSGRKAPLHSPPSQHYTIVFNTFVLMQLFNEINSRKIHGEKNVFSGIYRNIIFCSVVLGTFICQIFIVEFGGKPFSCTSLSLSQWLWCLFIGIGELLWGQFISAIPTRSLKFLKEAGHGTTKEEITKDAEGLDEIDHAEMELRRGQILWFRQRIQTQIKVVKAFHSSLHESIQKPYNQKSIHSFMTHPEFAIEEELPRTPLLDEEEEENPDKASKFGTRVLLLDGEVTPYANTNNNAVDCNQVQLPQSDSSLQSLETSV

SEQ ID NO: 1786 - DNA, 4280 bp, Homo sapiens
gcttagactgggtacctcttgcccttgcagatgctggatacttatggctgctctaatggtttctttttgtctatctttgaacctttattccagagatccagttgtcatcggtatccaggaagctctcctcttcctcctcctgacgtctactactacagttgctggttgttgctaaggttgctgccatggtaacatgcacatcctgtttacaccttcatctgggcaagttggtctaagctaggaacctacctaccctggacaactactatcatcaccacctggggacaccaatcatcgtgacacggagtccaccttccactcagttcccccatcctcttcctcctctcgctgccagacttcatacggaagaaaggatctagacttcggacggctactcgggagcttattgcacaagatatattcaatctattccctcactgggcccccagagaagcaagaagtaggaagaagttgagacagggaggcaggagacactggtcagttgaagggaaacgctacatcttctctggttgaggggcttggtaacagcaggcaaaatgacgaacccatcagaccgtgtcttgcctgccaactcgatggccgagagccgtgaaggggactttggctgcacagtaatggaactgaggaagctcatggagctgcgttcgagggatgcactgacccagattaatgtccactatggaggtgtacagaatctctgcagtagactgaaaacctcccctgtggaaggtctgtctgggaaccctgcagatctggagaaacgtaggcaggtgtttggacacaacgtgatcccccccaaaaagcccaagactttcttagaattagtgtgggaagctcttcaagatgtcacgcttatcatcctggagattgcagccatcatctccctggtcctgtccttttatcgccctgctggtgaagaaaatgaactgtgtggtcaagtcgcaactaccccagaagatgaaaatgaggcacaagctggctggattgagggggcagccatccttttctcagtgatcatcgtggtgttagtgactgcctttaatgattggagcaaagagaagcaattccgggggctgcagtgccgcattgaacaggagcaaaagttctccatcatccgaaacggtcaactcatccagctccctgtggctgagattgtggttggtgatattgcccaagtcaaatacggtgatctgctgcctgcagatggaatcctgatccaagggaatgatctgaagattgatgagagctctctgacaggggaatctgaccatgtcaagaagtccctggacaaagaccccatgttgctctcagggacccatgtcatggaaggttctggccggatggtggtgacagctgttggtgtcaactctcagactggaatcatccttactctcttgggggtcaatgaggatgacgaaggggagaaaaagaagaaaggtaaaaaacaaggagtccctgaaaatcgcaacaaagcaaagacccaagacggagtggccctggaaatccagccactcaacagccaggagggaatcgacaatgaggaaaaggacaagaaggcagtcaaggtgcctaaaaaggagaagtcagtgctgcagggcaagctgactcgcctggctgttcagattgggaaagccggtctgctcatgtctgctctcacggttttcatcctgattctatactttgtgattgacaactttgtgataaatcgcagaccatggctccctgagtgtactcccatctacatccagtactttgtcaagttcttcatcatcggcatcactgtactggtggtggctgtgccagaggggctgcctctggctgtcaccatctcactggcctactctgtgaagaaaatgatgaaagacaataacctagtacggcacttggatgcttgtgagaccatgggcaacgccaccgccatctgctctgataagacaggcacgttgaccatgaaccgcatgactgtggtacaagcttatattgggggcatccattaccgtcaaatcccaagccctgatgtcttcctgcccaaagtcctggacctcattgtcaatggcatttctatcaacagtgcttatacctccaagattctgcctccagagaaggagggaggcctgcctcggcaggtgggcaacaagaccgagtgtgctctgctaggctttgtcacagatctgaagcaggattatcaggctgtgcgtaatgaagtgcccgaggagaagctctacaaggtgtacacctttaactcagtgcgcaagtcaatgagcaccgtcatcaggaatcccaacggtggcttccgtatgtacagcaagggcgcctctgagatcatcttgcgcaagtgtaatcgaatcctggaccggaaaggggaagcagtgccattcaagaataaagacagagatgatatggtacgcactgtcatcgagcccatggcctgtgatggactccggactatctgcatagcttaccgggacttcgatgacacagagccctcttgggacaatgagaatgagatcctcaccgaactgacctgtatcgcggtggtgggcattgaggaccctgtgcgcccagaggtgccagatgctattgccaaatgcaaacaagctggcattactgtcagaatggtgacaggtgacaacatcaacacagcccgggccattgccaccaaatgtggcattctgacacctggggatgacttcctgtgcttagaaggcaaagaattcaaccggctcatccgcaacgagaaaggcgaggtagagcaagaaaagctggacaagatctggcctaagcttcgggtcctggcgcgatcttctcccactgacaagcacaccctggtgaaaggcataattgacagcactgttggggaacaccggcaggtcgtggctgtcactggtgatggcacaaatgacgggcctgctctgaagaaagcggatgttggttttgccatgggcatcgcaggcacagatgtagcaaaggaggcttcagacatcatcctaacagatgacaacttcaccagcattgtgaaggcagtgatgtggggacgaaatgtctatgacagcatctccaagttcctgcagttccagctcactgtcaatgtggtggccgtgattgtagccttcactggagcctgtatcactcaggattccccattgaaagctgtgcagatgttgtgggttaatctgatcatggacacttttgcttcattggccctggccacagagccccctacggaatctctgttgaagcggcgcccctatggccgaaataagcctctgatctcacgcactatgatgaagaacatcttgggccatgcattctatcagctcattgtcatctttatccttgtctttgcgggtgagaaattctttgatattgatagtgggaggaaggcacctctacattcaccacccagccagcactataccattgtttttaacaccttcgtgctgatgcagctcttcaatgaaatcaactcccgaaagatccatggagagaagaacgtcttttcaggcatctaccgcaacattatcttctgctctgtagtcttgggcacattcatctgccagattttcatcgtggaatttgggggtaaacccttcagttgtacaagcctcagcctgtctcagtggctgtggtgtctcttcattgggattggagaacttctgtggggccagttcatctccgcaatacctacccgatccctgaagttcctgaaggaggctgggcatggcaccaccaaagaggagatcaccaaggatgccgagggactggatgagattgaccatgctgagatggagctgcgccgaggccagatcctctggttccggggcctgaaccgtatccagactcagatcgacgtaattaacacattccagacgggagcctcttttaagggagtcctaaggcgacagaacatgggtcaacaccttgatgtaaaacttgttcctagttcatcctatatcaaagtggtcaaagcgttccatagttccctccacgaaagcattcagaaaccctacaaccaaaagtccatccacagcttcatgacccaccctgaattcgccatagaggaggagttgccacgaacaccactcctggatgaggaagaggaggaaaatcctgacaaggcttctaagtttgggactagggtgctcctgttggatggtgaggtcactccatatgccaatacaaacaacaatgcggtggattgcaaccaagtgcagctcccccagtcggacagctctctacagagcctagagacatcagtt

SEQ ID NO: 1787 - protein, 1233 aa, Homo sapiens
MTNPSDRVLPANSMAESREGDFGCTVMELRKLMELRSRDALTQINVHYGGVQNLCSRLKTSPVEGLSGNPADLEKRRQVFGHNVIPPKKPKTFLELVWEALQDVTLIIIAAIISLVLSFYRPAGEENELCGQVATTPEDENEAQAGWIEGAAILFSVIIVVLVTAFNDWSKEKQFRGLQCRIEQEQKFSIIRNGQLIQLPVAEIVVGDIAQVKYGDLLPADGILIQGNDLKIDESSLTGESDHVKKSLDKDPMLLSGTHVMEGSGRMVVTAVGVNSQTGIILTLLGVNEDDEGEKKKKGKKQGVPENRNKAKTQDGVEIQPLNSQEGIDNEEKDKKAVKVPKKEKSVLQGKLTRLAVQIGKAGLLMSALTVFILILYFVIDNFVINRRPWLPECTPIYIQYFVKFFIIGITVLVVAVPEGLPLAVTISLAYSVKKMMKDNNLVRHLDACETMGNATAICSDKTGTLTMNRMTVVQAYIGGIHYRQIPSPDVFLPKVLDLIVNGISINSAYTSKILPPEKEGGLPRQVGNKTECALLGFVTDLKQDYQAVRNEVPEEKLYKVYTFNSVRKSMSTVIRNPNGGFRMYSKGASEIILRKCNRILDRKGEAVPFKNKDRDDMVRTVIEPMACDGLRTICIAYRDFDDTEPSWDNENEILTELTCIAVVGIEDPVRPEVPDAIAKCKQAGITVRMVTGDNINTARAIATKCGILTPGDDFLCLEGKEFNRLIRNEKGEVEQEKLDKIWPKLRVLARSSPTDKHTLVKGIIDSTVGEHRQVVAVTGDGTNDGPALKKADVGFAMGIAGTDVAKEASDIILTDDNFTSIVKAVMWGRNVYDSISKFLQFQLTVNVVAVIVAFTGACITQDSPLKAVQMLWVNLIMDTFASLATEPPTESLLKRRPYGRNKPLISRTMMKNILGHAFYQLIVIFILVFAGEKFFDIDSGRKAPLHSPPSQHYTIVFNTFVLMQLFNEINSRKIHGEKNVFSGIYRNIIFCSVVLGTFICQIFIVEFGGKPFSCTSLSLSQWLWCLFIGIGELLWGQFISAIPTRSLKFLKEAGHGTTKEEITKDAEGLDEIDHAEMELRRGQILWFRQRIQTQIDVINTFQTGASFKGVLRRQNMGQHLDVKLVPSSSYIKVVKAFHSSLHESIQKPYNQKSIHSFMTHPEFAIEEELPRTPLLDEEEEENPDKASKFGTRVLLLDGEVTPYANTNNNAVDCNQVQLPQSDSSLQSLETSV

SEQ ID NO: 1788 - DNA, 709 bp, Homo sapiens
cgcaacattatcttctgctctgtagtcttgggcacattcatctgccagttcatctccgcaatacctacccgatccctgaagttcctgaaggaggctgggcatggcaccaccaaagaggagatcaccaaggatgccgagggactggatgagattgaccatgctgagatggagctgcgccgaggccagatcctctggttccggggcctgaaccgtatccagactcagatcgacgtaattaacacattccagacgggagcctcttttaagggagtcctaaggcgacagaacatgggtcaacaccttgatgtaaaacttgttcctagttcatcctatgtagcagttgcaccagtcaaatcttcccccaccacttctgttcctgctgtttcatctcctcctatgggcaatcaaagtggtcaaagcgttccatagttccctccacgaaagcattcagaaaccctacaaccaaaagtccatccacagcttcatgacccaccctgaattcgccatagaggaggagttgccacgaacaccactcctggatgaggaagaggaggaaaatcctgacaaggcttctaagtttgggactagggtgctcctgttggatggtgaggtcactccatatgccaatacaaacaacaatgcggtggattgcaaccaagtgcagctcccccagtcggacagctctctacagagcctagagacatcagtt

SEQ ID NO: 1789 - protein, 85 aa, Homo sapiens
MELRRGQILWFRQRIQTQIDVINTFQTGASFKGVLRRQNMGQHLDVKLVPSSSYVAVAPVKSSPTTSVPAVSSPPMGNQSGQSVP

SEQ ID NO: 1790 - DNA, 4350 bp, Homo sapiens
gcttagactgggtacctcttgcccttgcagatgctggatacttatggctgctctaatggtttctttttgtctatctttgaacctttattccagagatccagttgtcatcggtatccaggaagctctcctcttcctcctcctgacgtctactactacagttgctggttgttgctaaggttgctgccatggtaacatgcacatcctgtttacaccttcatctgggcaagttggtctaagctaggaacctacctaccctggacaactactatcatcaccacctggggacaccaatcatcgtgacacggagtccaccttccactcagttcccccatcctcttcctcctctcgctgccagacttcatacggaagaaaggatctagacttcggacggctactcgggagcttattgcacaagatatattcaatctattccctcactgggcccccagagaagcaagaagtaggaagaagttgagacagggaggcaggagacactggtcagttgaagggaaacgctacatcttctctggttgaggggcttggtaacagcaggcaaaatgacgaacccatcagaccgtgtcttgcctgccaactcgatggccgagagccgtgaaggggactttggctgcacagtaatggaactgaggaagctcatggagctgcgttcgagggatgcactgacccagattaatgtccactatggaggtgtacagaatctctgcagtagactgaaaacctcccctgtggaaggtctgtctgggaaccctgcagatctggagaaacgtaggcaggtgtttggacacaacgtgatcccccccaaaaagcccaagactttcttagaattagtgtgggaagctcttcaagatgtcacgcttatcatcctggagattgcagccatcatctccctggtcctgtccttttatcgccctgctggtgaagaaaatgaactgtgtggtcaagtcgcaactaccccagaagatgaaaatgaggcacaagctggctggattgagggggcagccatccttttctcagtgatcatcgtggtgttagtgactgcctttaatgattggagcaaagagaagcaattccgggggctgcagtgccgcattgaacaggagcaaaagttctccatcatccgaaacggtcaactcatccagctccctgtggctgagattgtggttggtgatattgcccaagtcaaatacggtgatctgctgcctgcagatggaatcctgatccaagggaatgatctgaagattgatgagagctctctgacaggggaatctgaccatgtcaagaagtccctggacaaagaccccatgttgctctcagggacccatgtcatggaaggttctggccggatggtggtgacagctgttggtgtcaactctcagactggaatcatccttactctcttgggggtcaatgaggatgacgaaggggagaaaaagaagaaaggtaaaaaacaaggagtccctgaaaatcgcaacaaagcaaagacccaagacggagtggccctggaaatccagccactcaacagccaggagggaatcgacaatgaggaaaaggacaagaaggcagtcaaggtgcctaaaaaggagaagtcagtgctgcagggcaagctgactcgcctggctgttcagattgggaaagccggtctgctcatgtctgctctcacggttttcatcctgattctatactttgtgattgacaactttgtgataaatcgcagaccatggctccctgagtgtactcccatctacatccagtactttgtcaagttcttcatcatcggcatcactgtactggtggtggctgtgccagaggggctgcctctggctgtcaccatctcactggcctactctgtgaagaaaatgatgaaagacaataacctagtacggcacttggatgcttgtgagaccatgggcaacgccaccgccatctgctctgataagacaggcacgttgaccatgaaccgcatgactgtggtacaagcttatattgggggcatccattaccgtcaaatcccaagccctgatgtcttcctgcccaaagtcctggacctcattgtcaatggcatttctatcaacagtgcttatacctccaagattctgcctccagagaaggagggaggcctgcctcggcaggtgggcaacaagaccgagtgtgctctgctaggctttgtcacagatctgaagcaggattatcaggctgtgcgtaatgaagtgcccgaggagaagctctacaaggtgtacacctttaactcagtgcgcaagtcaatgagcaccgtcatcaggaatcccaacggtggcttccgtatgtacagcaagggcgcctctgagatcatcttgcgcaagtgtaatcgaatcctggaccggaaaggggaagcagtgccattcaagaataaagacagagatgatatggtacgcactgtcatcgagcccatggcctgtgatggactccggactatctgcatagcttaccgggacttcgatgacacagagccctcttgggacaatgagaatgagatcctcaccgaactgacctgtatcgcggtggtgggcattgaggaccctgtgcgcccagaggtgccagatgctattgccaaatgcaaacaagctggcattactgtcagaatggtgacaggtgacaacatcaacacagcccgggccattgccaccaaatgtggcattctgacacctggggatgacttcctgtgcttagaaggcaaagaattcaaccggctcatccgcaacgagaaaggcgaggtagagcaagaaaagctggacaagatctggcctaagcttcgggtcctggcgcgatcttctcccactgacaagcacaccctggtgaaaggcataattgacagcactgttggggaacaccggcaggtcgtggctgtcactggtgatggcacaaatgacgggcctgctctgaagaaagcggatgttggttttgccatgggcatcgcaggcacagatgtagcaaaggaggcttcagacatcatcctaacagatgacaacttcaccagcattgtgaaggcagtgatgtggggacgaaatgtctatgacagcatctccaagttcctgcagttccagctcactgtcaatgtggtggccgtgattgtagccttcactggagcctgtatcactcaggattccccattgaaagctgtgcagatgttgtgggttaatctgatcatggacacttttgcttcattggccctggccacagagccccctacggaatctctgttgaagcggcgcccctatggccgaaataagcctctgatctcacgcactatgatgaagaacatcttgggccatgcattctatcagctcattgtcatctttatccttgtctttgcgggtgagaaattctttgatattgatagtgggaggaaggcacctctacattcaccacccagccagcactataccattgtttttaacaccttcgtgctgatgcagctcttcaatgaaatcaactcccgaaagatccatggagagaagaacgtcttttcaggcatctaccgcaacattatcttctgctctgtagtcttgggcacattcatctgccagattttcatcgtggaatttgggggtaaacccttcagttgtacaagcctcagcctgtctcagtggctgtggtgtctcttcattgggattggagaacttctgtggggccagttcatctccgcaatacctacccgatccctgaagttcctgaaggaggctgggcatggcaccaccaaagaggagatcaccaaggatgccgagggactggatgagattgaccatgctgagatggagctgcgccgaggccagatcctctggttccggggcctgaaccgtatccagactcagatcgacgtaattaacacattccagacgggagcctcttttaagggagtcctaaggcgacagaacatgggtcaacaccttgatgtaaaacttgttcctagttcatcctatgtagcagttgcaccagtcaaatcttcccccaccacttctgttcctgctgtttcatctcctcctatgggcaatcaaagtggtcaaagcgttccatagttccctccacgaaagcattcagaaaccctacaaccaaaagtccatccacagcttcatgacccaccctgaattcgccatagaggaggagttgccacgaacaccactcctggatgaggaagaggaggaaaatcctgacaaggcttctaagtttgggactagggtgctcctgttggatggtgaggtcactccatatgccaatacaaacaacaatgcggtggattgcaaccaagtgcagctcccccagtcggacagctctctacagagcctagagacatcagtt

SEQ ID NO: 1791 - protein, 1162 aa, Homo sapiens
MTNPSDRVLPANSMAESREGDFGCTVMELRKLMELRSRDALTQINVHYGGVQNLCSRLKTSPVEGLSGNPADLEKRRQVFGHNVIPPKKPKTFLELVWEALQDVTLIIIAAIISLVLSFYRPAGEENELCGQVATTPEDENEAQAGWIEGAAILFSVIIVVLVTAFNDWSKEKQFRGLQCRIEQEQKFSIIRNGQLIQLPVAEIVVGDIAQVKYGDLLPADGILIQGNDLKIDESSLTGESDHVKKSLDKDPMLLSGTHVMEGSGRMVVTAVGVNSQTGIILTLLGVNEDDEGEKKKKGKKQGVPENRNKAKTQDGVEIQPLNSQEGIDNEEKDKKAVKVPKKEKSVLQGKLTRLAVQIGKAGLLMSALTVFILILYFVIDNFVINRRPWLPECTPIYIQYFVKFFIIGITVLVVAVPEGLPLAVTISLAYSVKKMMKDNNLVRHLDACETMGNATAICSDKTGTLTMNRMTVVQAYIGGIHYRQIPSPDVFLPKVLDLIVNGISINSAYTSKILPPEKEGGLPRQVGNKTECALLGFVTDLKQDYQAVRNEVPEEKLYKVYTFNSVRKSMSTVIRNPNGGFRMYSKGASEIILRKCNRILDRKGEAVPFKNKDRDDMVRTVIEPMACDGLRTICIAYRDFDDTEPSWDNENEILTELTCIAVVGIEDPVRPEVPDAIAKCKQAGITVRMVTGDNINTARAIATKCGILTPGDDFLCLEGKEFNRLIRNEKGEVEQEKLDKIWPKLRVLARSSPTDKHTLVKGIIDSTVGEHRQVVAVTGDGTNDGPALKKADVGFAMGIAGTDVAKEASDIILTDDNFTSIVKAVMWGRNVYDSISKFLQFQLTVNVVAVIVAFTGACITQDSPLKAVQMLWVNLIMDTFASLATEPPTESLLKRRPYGRNKPLISRTMMKNILGHAFYQLIVIFILVFAGEKFFDIDSGRKAPLHSPPSQHYTIVFNTFVLMQLFNEINSRKIHGEKNVFSGIYRNIIFCSVVLGTFICQIFIVEFGGKPFSCTSLSLSQWLWCLFIGIGELLWGQFISAIPTRSLKFLKEAGHGTTKEEITKDAEGLDEIDHAEMELRRGQILWFRQRIQTQIDVINTFQTGASFKGVLRRQNMGQHLDVKLVPSSSYVAVAPVKSSPTTSVPAVSSPPMGNQSGQSVP

SEQ ID NO: 1792 - DNA, 4639 bp, Homo sapiens
gcttagactgggtacctcttgcccttgcagatgctggatacttatggctgctctaatggtttctttttgtctatctttgaacctttattccagagatccagttgtcatcggtatccaggaagctctcctcttcctcctcctgacgtctactactacagttgctggttgttgctaaggttgctgccatggtaacatgcacatcctgtttacaccttcatctgggcaagttggtctaagctaggaacctacctaccctggacaactactatcatcaccacctggggacaccaatcatcgtgacacggagtccaccttccactcagttcccccatcctcttcctcctctcgctgccagacttcatacggaagaaaggatctagacttcggacggctactcgggagcttattgcacaagatatattcaatctattccctcactgggcccccagagaagcaagaagtaggaagaagttgagacagggaggcaggagacactggtcagttgaagggaaacgctacatcttctctggttgaggggcttggtaacagcaggcaaaatgacgaacccatcagaccgtgtcttgcctgccaactcgatggccgagagccgtgaaggggactttggctgcacagtaatggaactgaggaagctcatggagctgcgttcgagggatgcactgacccagattaatgtccactatggaggtgtacagaatctctgcagtagactgaaaacctcccctgtggaaggtctgtctgggaaccctgcagatctggagaaacgtaggcaggtgtttggacacaacgtgatcccccccaaaaagcccaagactttcttagaattagtgtgggaagctcttcaagatgtcacgcttatcatcctggagattgcagccatcatctccctggtcctgtccttttatcgccctgctggtgaagaaaatgaactgtgtggtcaagtcgcaactaccccagaagatgaaaatgaggcacaagctggctggattgagggggcagccatccttttctcagtgatcatcgtggtgttagtgactgcctttaatgattggagcaaagagaagcaattccgggggctgcagtgccgcattgaacaggagcaaaagttctccatcatccgaaacggtcaactcatccagctccctgtggctgagattgtggttggtgatattgcccaagtcaaatacggtgatctgctgcctgcagatggaatcctgatccaagggaatgatctgaagattgatgagagctctctgacaggggaatctgaccatgtcaagaagtccctggacaaagaccccatgttgctctcagggacccatgtcatggaaggttctggccggatggtggtgacagctgttggtgtcaactctcagactggaatcatccttactctcttgggggtcaatgaggatgacgaaggggagaaaaagaagaaaggtaaaaaacaaggagtccctgaaaatcgcaacaaagcaaagacccaagacggagtggccctggaaatccagccactcaacagccaggagggaatcgacaatgaggaaaaggacaagaaggcagtcaaggtgcctaaaaaggagaagtcagtgctgcagggcaagctgactcgcctggctgttcagattgggaaagccggtctgctcatgtctgctctcacggttttcatcctgattctatactttgtgattgacaactttgtgataaatcgcagaccatggctccctgagtgtactcccatctacatccagtactttgtcaagttcttcatcatcggcatcactgtactggtggtggctgtgccagaggggctgcctctggctgtcaccatctcactggcctactctgtgaagaaaatgatgaaagacaataacctagtacggcacttggatgcttgtgagaccatgggcaacgccaccgccatctgctctgataagacaggcacgttgaccatgaaccgcatgactgtggtacaagcttatattgggggcatccattaccgtcaaatcccaagccctgatgtcttcctgcccaaagtcctggacctcattgtcaatggcatttctatcaacagtgcttatacctccaagattctgcctccagagaaggagggaggcctgcctcggcaggtgggcaacaagaccgagtgtgctctgctaggctttgtcacagatctgaagcaggattatcaggctgtgcgtaatgaagtgcccgaggagaagctctacaaggtgtacacctttaactcagtgcgcaagtcaatgagcaccgtcatcaggaatcccaacggtggcttccgtatgtacagcaagggcgcctctgagatcatcttgcgcaagtgtaatcgaatcctggaccggaaaggggaagcagtgccattcaagaataaagacagagatgatatggtacgcactgtcatcgagcccatggcctgtgatggactccggactatctgcatagcttaccgggacttcgatgacacagagccctcttgggacaatgagaatgagatcctcaccgaactgacctgtatcgcggtggtgggcattgaggaccctgtgcgcccagaggtgccagatgctattgccaaatgcaaacaagctggcattactgtcagaatggtgacaggtgacaacatcaacacagcccgggccattgccaccaaatgtggcattctgacacctggggatgacttcctgtgcttagaaggcaaagaattcaaccggctcatccgcaacgagaaaggcgaggtagagcaagaaaagctggacaagatctggcctaagcttcgggtcctggcgcgatcttctcccactgacaagcacaccctggtgaaaggcataattgacagcactgttggggaacaccggcaggtcgtggctgtcactggtgatggcacaaatgacgggcctgctctgaagaaagcggatgttggttttgccatgggcatcgcaggcacagatgtagcaaaggaggcttcagacatcatcctaacagatgacaacttcaccagcattgtgaaggcagtgatgtggggacgaaatgtctatgacagcatctccaagttcctgcagttccagctcactgtcaatgtggtggccgtgattgtagccttcactggagcctgtatcactcaggattccccattgaaagctgtgcagatgttgtgggttaatctgatcatggacacttttgcttcattggccctggccacagagccccctacggaatctctgttgaagcggcgcccctatggccgaaataagcctctgatctcacgcactatgatgaagaacatcttgggccatgcattctatcagctcattgtcatctttatccttgtctttgcgggtgagaaattctttgatattgatagtgggaggaaggcacctctacattcaccacccagccagcactataccattgtttttaacaccttcgtgctgatgcagctcttcaatgaaatcaactcccgaaagatccatggagagaagaacgtcttttcaggcatctaccgcaacattatcttctgctctgtagtcttgggcacattcatctgccagattttcatcgtggaatttgggggtaaacccttcagttgtacaagcctcagcctgtctcagtggctgtggtgtctcttcattgggattggagaacttctgtggggccagttcatctccgcaatacctacccgatccctgaagttcctgaaggaggctgggcatggcaccaccaaagaggagatcaccaaggatgccgagggactggatgagattgaccatgctgagatggagctgcgccgaggccagatcctctggttccggggcctgaaccgtatccagactcagatcaaagtggtcaaagcgttccatagttccctccacgaaagcattcagaaaccctacaaccaaaagtccatccacagcttcatgacccaccctgaattcgccatagaggaggagttgccacgaacaccactcctggatgaggaagaggaggaaaatcctgacaaggcttctaagtttgggactagggtgctcctgttggatggtgaggtcactccatatgccaatacaaacaacaatgcggtggattgcaaccaagtgcagctcccccagtcggacagctctctacagagcctagagacatcagtttgaattttctttctctgactctcatccctattttacctatttccattttcgtctatcccatctatgaggtgatgatgggacttttcattgtcacgtcagctgctgtgttaacagcagtgtgtgtgaagtgaacctctacctgaccatgaagaggcaagagcacagacttacaaggatttcaacttaagcttgacttggggtttgtagcgggacccagtcaaaccccattcaggtcatggtagaatctactccttggtagtcacttgtcatttttaaagaaatgatgacaatcctcttggcatcaccccaccccacattctccccgatgttcctctcctgaattctggattttgtcctacaagtctgtgccatttataagctaagttgagggttcagagggagacaaatatccccaagtgaaatatgttgcggtagagatggaatgtataaaatccgccagtagtgtg

SEQ ID NO: 1793 - protein, 1197 aa, Homo sapiens; identical to SEQ ID NO: 1785

SEQ ID NO: 1794 - DNA, 18788 bp, Mus musculus
ggttgatgatgctcctgttacctctgctcgctgtattcttggtgaagcgaagccatactcgtaagtatcctgagtgctctttgcttccaaatgcaatgctgaagcataacgacggctttgctttctaaacttgtggtgcaaactataaaaaagccagagacaaacccacaggtcctttgtacccaagacttgaagggtgatggaccaactggcctgctgttcagatgtgtgtgcatggatgccagcctgcccagaaagactgcctcacttttcctctgagagctatgtccccacttttctgctatacccttactttcccttctgtttctcttcttttcttttctaacaatgaacctgcgtgtagggagagtttcaggggagttgaaccacccaatctgtccatcgttcaggccaatagataatttttcctcctcaggacaaggacatcctgtaacaaaagatgcatgaaagataaagccatggctctgagctcgtttactaggtgtaggaaatattcatggatttaaaacaaagttctggggctggagagatgtctcagcggttaagagcaatggctgttcttccagagtgcaccagttcaattcctggaacccacggggcagctcacaactgtctgtaattccagttccaggggatctgacatcttcacatagacatccatgcaggcaaaacaccagagtacgtaaaaataagtgaaaattagaataaacatcgtagtttagggagcttgtgtctctaagggatcaagagccctgtgttgccaccaacacaggagagtccgtgtgacaggaagtgctagccttctctaccctaagcaactgctttccagctggctgttagtgcttttaaaggttcacaggagaattgcagaactccgatcaggccacccaagctgctgactaatgttcatgccaggaaggaactctttcaaatcgtgtctgtgttagttctacaagtattgattgatagcttgctacgtgtcagctgattggaggaatgtaacaactggatatggatatggtgatgcaaacttacagtcctagctactctaaaggcttaggggggaatggtgagtttgaggccagtttgagtgtcgaaagaaagaaagagatcgagaaagagaggaagggaaggagggagggagggaaggagggagggagggaggaagggaggaaggaaggaaggaaggaaggaaggaaggaaggaaggaaggaaggaaggaaggaaggaaggaaggaaggaaggaagagagaacaataaagatcaggttagatgtttctctggcttacggagattgcagaaccctctggcacagtgatcacaagtgaacacaggtcttctgcctttagcccaggcctttctgtgatactgctgaacttccgagtaccccgtacatagataatttgtgggtagttataggatggggtgctgcactatgctggttgttttcctctgactcttagatgtgttcctgctgtgttgctttgtgttctagaagccgagggctacagactgcatcacccagtcctagcttctgtgttggttcacttggtaggaaatgctaggaaaagagaagagaacaaggagaaaagagagattgaagtttgcttttcttgcctccttccttctttctagaagtctctggcagtagctatctgtagctctctgcagtgtaggttgtttttccttttgtctgaaaatccctcttctttagagttttagcttccgctgggctttagcaattcttattagctgcccatttccctgtaatcttaggggtgaacatggtttattatagttacttccttatggtctctccatgggacctttttggtaagggttgtttcctcccatggttctcactaaatgaactttgaggaaaatgacagggaagggatttcagatttatgggaaataactaaaggcctacatgatgtttgtctccagtgttacccataaatagatacttttgcaccataggtggatagcagacacggggaagagaaaccagagtgtttgagacgtaactccaggaaatgttaagataattctcacattacgtccagcacgtcgctctcagcagcagcatagcccacgggtgattgtgtctgttccttcctttgagttcccacgtttcctcttcatggtttctcatttcccaaaatcttcccttagctgctcttttcactggtgggaagagacagctccattttcctcttggttttgtgaccttgttcccaacagacacttcaatgcttcctaaaagactttatgtgtcaaagtaatgttcctaagacattgaagtcacctgactaggaagtatagcaagcttggacaacaataatgaattcaaatgtcaaactctgatctactgtagttgcagaactgatgtaaaaattggtgctttgtgctccttgctcttcatttcagctggtgtgaagctgaagtgatgctgcatgtctctgtaacatgggacatcctacatgagatttcccttgcatagctctatatactttgtgtgtttcatcttgatatagttaaagttagtctcttgatgttattcataatttaatagatgagtcagcccgctacatcaatctactttatgaatgatgcttcagagattaggactgatcatggacaaaccagttgtgttagtgttagaagatgtacttgtagattatctgcttagaaataaccttgagccaagccagggtggtacaagcctttaatcccagcacttgggaggcagaggccggctaatttctgagttcgacaccaccctggtctacagagtgggttccaggacatctagagctgcacagagaaaccttgtctcaaaaataaaacaaaccaaagagcggggtggggggtggggtggagggagaggagaggagtagggaggggtaaggggagagggagggagggagggacggagggagggagggagggggagagagagagagagagaaccttgagttcaaagagttggcatgagaaaatagggcaattagatttcagtctgtttccatgttgctgttaggttcatggaaaagaaatttctccaagacaatatttcatccccctaaaactctctttcttcatagttgatattgaatgtatctaattctgataaatagatttttaaaaatattttatttattttatatacgtgagtacactgtagctatcttcagacacaccagaagagggtgtcagatcccattacaaatggttgtgagccaccctgtggttgctgggaattgaattgaggacctctggaaaagcagtcattgctcttaaccactgatccatctctccagcccagatttttcttttaaccagggagaacaactatctattcttgcttgaccacaatcctcttaccttagaggactgctaaaatttcaagggaagaggtctagactaaaggtcaaacacatagctctttaaatgcttttactttatgaagctctaattgacatagatactagggacatgatttctgacttttaagtttatatttttaaaaaatctcttaagaatataagtgtcaaaccacattttattacactttcaatgaattctttaaaaacaataagattcactgtgagttcaaggccagcccaatctagagagcaagttccaggacaaccagggctacacagagaaaccctgtctcaggaaaacaaaacaacaacaaagaataggattcaagaaattgagattctcctgggatatatgagatgtgcggtcattattgtactcaaggtgtagggaagggaaaaaagcacttcaggccctcattcattctccctggagccccacagtggtctccttgaggttcttccagtatgcaaagcatgcaccctcaaggatttgggctcagttatctggaagggtcttcccccatggcccctccttcactctagacacaactcaatgttacctggtcaaagaagccatttctggtctgtttaacacattggttctcttcactctctttcctttctctacttttgttttctttatttgtttgcttgttttgggggttttgttcgtttgtttgtttgtttgtgacaagaattctctgtgtagccctggctgtcctggaattcacagagatccacctgtctctgttacccaactgggattaaaggcatataccaccatgcatactagtttcttaatacaatttattatcacttgaccttgtattatatatttgtcagttgacaatattccttctagaaattatctcagaggactggtcctttatttgttccatattgtgctcctagcatctagaactatgtttactagaaattcagaaaagaataatacttatatgaagtgaagtattgataaatgttaaaggggtagccatgaaagagtaactgtaattgtttcaataggaaatagtccttacaggtatatgtgattgcgcccttggtttcagatgacggctctgttgtgatattgtgaagttttaggacacgggacttagcttgcagacttaaggctacagaggcaagaattgagaggtataagttgaccctacttctatcccaagctcagtacttcctagctgtgtagtgtgatgatagtgagctgcaagcttcttgctccccaactaagctaatcccagcttccacgccttcttcactatgagggactgtatttccttaagccattatgcaaataagtcgttcctgctttgtgctgtttctgtcaagtatcacatcagagcaatgagaaaagcaacttattgtggtcattgcaatgctaaacctgacgatgcagtctgtgggacttcagaagtgaagtgtaagagtaatataaagtttggagctgtgggctccaaatgctgtaactagaactttgtgggatgttctcgcagaggccaagagggacgttatcaggaattggactagaggctattccggcaaagaatcgatgtcccccctctgtgtcctgaaagtcaaaatgaggctgaattaaagagcaatatactaatgtgtttggtgaagaaaatctctagtcagaagtgttcagactgtggcggttactgtccctgcttttagcccatattacagcaatagacagctgaaagctgaggggaaatatttgaaaagtatatagtttggcagggaaagggacatgaatacagttgtggtcaaagcaagtgtgggaaaagctgtgataattcatacaggtattagtactattaaagaaaaatctcacatctctccagccccaagattttggatttcgatcagtgttggaacccttaagatgttagggggtagggggggctggggaaatggctcagtggttaagagcactgactgctcttccagaggtcctgagttcaattcccagcaaccacaaggtggcttacaaccatctgtaatgagatctgatgccctctgctggtgtgtctgaagacagtaacagtgtactttttttttttaatgattttcagacaagcaaaaactttaataaaatcaatctctcaaagtaaaataaataaataaataaaaagatgttagggactttcccagttgtaaaatgcaccttgtatcatgaggtagccatgggcctctggggtcagggctgtggattgaatgtgaaatgcaccccccccaggtttgtatatttacacactaggtgctcagttggtagtgtctcttgagaagttgtgtggtttggggggcacacaacacagataacaggtcttaaggttggctaagggttattatcgtccagcacaattctagcctgagccctctgctttctgacctggaaggatatgaggaaccgtagcacaagctccagcaagcccagaccaggctgatcccagccactctttcctcttctccatggactctactcctttattccatgagccaaaacaaatccttccccccttcggtttctatcatgtatttctcagtagggacaagaaaagtaattaatacagtggctaagaagtcagactggcacatttgtcagttttagacttgccgttaagagccagtctcttgacagttgttaggagaagggactaatggcttctgctgcgtgcagaaccatcgacatcactgcatgctttgaggagtgtcccaaggttcttttacctaaaatacaaccatttacttctctcctcattcccacaatccccgggatctcaaagagtagttatcagaaatcacaatcatttttaccgtactaagacactgagctgcttgaagagggtaacaataaactgttctttattgaaatggctacccaatcagaacctcctaccaacctgaggaagatctgcttgggctctagggactggaagatcaaagactgaaacatgtctgacacaagggggcaggagagagcactttaatccaggctctggaagagtctctcaagcagagttgagtagtcataggtagagaagctcccgatgtgagagttcagcttttgatttctggttccttcactgtggcttttaaggttgtgcttaatttagttaattttgagtaatgtacttaatctctctgcaccttccatctgtggaatgggaatgatgggacctaccttgatggatgttattgtgaaggctggggatgtagcccgatagataagagttcttgtctagcttgtacaaagtcctgggatcaatccctcgtgccacctgaaccagatttggtgatttgtgaggcaggagaatcagaaggtcaaggtcatggttgactacatagacagtttgaggccagcctgacatgagaccatgttttgttttgtttaattattgtgaggaatgaatgaagccaatgttgctcaagggtttgtatagcactggccacatggtccctgcacaaaaaataaatacacgtaaatagtgatgatggaggtacctgctgccctttaggcctcactgaaggtgtaactggtctggcttgatctccttggaggatttctcaggaacactcctactcctacgtgagcagggttgctgtcttgcctacaccccataggtgccttttttgtttgtttgtttttgtttttgtttttgtttttgttttttgttttgttttgttttggtttttcaagacaggatttctctgtgtagccctggctgtcctggagctcactttgtagaccaggaaggcctcaaacccagaaatccacctgcctctgcctcccaagttaaaggcgtgggccaccaccggcggactcggtgcctcttttgtgacacttgtatttgttctgttatataaaaatccccagttatactgtaaatttctggagggaagaagtggtacctgattcattttcctcttcagatgttgcatcatagcttgtccatggtagatattcaataaaaacaagtccggggttttatattccagtaattttccttagatgtttgtcaaaagtggcccaactgctattgtaccaagttaaagagacaaggctcggggtgggcgtggggctgggggtgggatgagccagcactctggtgtgagagatgcttgttgagttgaatgaactccccagaaggcctaggagatttgagtaaacagtaagtgatccttgaagagcagtgtgactggcccagctagacaaagccaaatgctaagctcatagatgtcagctccacaagtgagtcatgttggtgactcatggaaaggggccaacccaacctgacttcataatcgttggagcaagagggggagcggagcaaatggtttcgaaatcacagtctgtgtagaacaattttagtccttccaaatgattcgaccttagtagttatattaaatcttcaaatatctgggcaacacattctggtaagatacgaattgccacaaggtctggcatgctatgaaggggagtgtaacaaggacttttcttcatcttccctggtctgaattaccgacttcatatctgtcagccgacatccctggatcatgaagtgccattttagaagcctggctaagggccaggcacaacttatacctgtagaggcaccagatgggtcccacagagaatgaagagaaggctgtggtgtccttggccagcatgcacgccctctctccccttggcctgctcagctcttgaccctgagatcttctccaagatgtcaccctctctatagaacctttcctaagagcccacattgacatgatagcccatatacgctacttctaaaaccaccttcttttacctatactatgtcctgaacttcttgcactatctaggagttcatttcagtttaccttgacccttactgatgatcacaatcctcatattgatatttcaatggacgaaaaagtagaaaaatagtaagaaagtagctaccaggagtggttgggtatagcaagaaaaagcatggtgcttttgaaagtattttctgcaggaggcctgagccttaacggctgttctgactctgtttaatctgggaagaagggtgtataccccagtatatgtagctggaagatggtagaaagatggccctcaattatcaacccagaggccttattagtaaaacaaggggttggactgtcagggttttctttccctcagaggctctgggggcttcttgaggcacatctccacgcctgccccatccccacccccacccacccagtgaatagttttggttcttcccccaagaccagaacatcacactgtaagttacttacaagtggaggttacctataaagtttcttcttcagtcacacagctgaagtctttccagatcgtaattactaggattctatagttgtgttggataaaatagtggctagaacactggtgaggggaatgccagggaatgcggttattacattctgtcatctgtgactctcaacgccttccttccttgtctcctcctcagggacccactcgctgagatattttcgtctagctgtttccgatcctggtcccgtcgtccctgaatttatctctgttgggtatgtggactcacaccctatcactacatacgacagtgtcactcgacagaaggagccgaaagctccatggatggcagagaacctggcacctgatcactgggagaggtacactcagctgctaaggggctggcagcagacattcaaggcggagctgaggcacctacagaggcactacaaccactcaggtgtgactgtagcagagatgagcactctccctcactggctactccccagaagacaggccctgggctgtctacgacaatttcactagttgcttatattctttgtagaaaacttagaaaatcaggttgctggagttcagtgaccaccatctcccccatgactcttccacactgacctgtaaaaaccctttatcccttgtccccatattcctatcccattggtatccaacactcttctctaacctcattctagatttgctccccttaggactcatgtgctgatggctagtcttcatgatttgcttatttctgcatagaaacttaagattttaattgccccagatatatttctggctcctgcgtatctcttgctcctacactgcactcagaatagctatgaaatttatcaatgaatcatcccaaagataggctaattccccaaggcaagcttcatcatgatcctttggcatgcagcaggtaccccaccaatgtctgcgagtaggtgggtctgctgaacaggaaccttttggaactcaaatatacagacctgtgtggtggtgtcttctaaggcaaaagtgctttcagccatgctccagttgtaccacttgagaagtctctctctgtctctgtttaaagccatcctcccataggctgtatatgtttcagggcttcacacctaccagagaatgattggctgtgagttgctagaagatggcagcaccacagggtttctccagtatgcatatgatggacaagatttcatcatcttcaataaagacaccctctcctggttggccatggattatgtggctcacatcaccaagcaagcatgggaggccaacctgcatgagttgcaataccaaaagaactggctggaagaagaatgcattgcctggctaaagaggttcttggaatatggaagagataccctagaaagaacaggtaatgggaagagagaacacctcattcttaacatgcctaggaaaactggctttgtgtctgacttcctcttctgcaggtgatattcgccctgtgctgaaatctgtctcttgcttggactgttctgacctgtaaccccccaagagaactctcattagttatatttttagcagcatcttgacaagccttagcagttccacttgtcttgacagaatgtaacacctccaagggcacctctatcaaaaaaagtcctctcctgtcagtgagaggctggggaaagcttttggaagtggggctgttgttgcagattatttaagaagcaagggttcacagaatccctgtgtgagtgcaaagctagtcctatgaagaagagccttgggaagacaggcttttccttacttggggattaactcttctgggtatagattttatcttctgccataaatgcatgatccaactggtcaacttcagcagcatgtggaatgttgcatgttggcttggatgattcaaaatgtttcaggaaatcctgaacactgtagaccttttcccatgaaagtaatggccagtctgggggactttccagagacatagcaagccctgggttgggaggaagggtatgggctatggttataaacatgtgctgccctgctaggtggtggtggctcaagcctttagtctcagcactaaagagcaagaagcaggtagatctctgtgagttcaaggccaatctggtctacggactgagttctaggacatccagggctacacagagaaagactgtctcaaaaacaaaacaaacaaagaaaataaccatgtgttgtctgtctaaaatgtccaggctttggaggtagatggttagagcctgatattggctttctttcctactagcagaataactgccataggctcaatggttgtaattaacaaccctatttcaaacaggctcacatcctatttgaaagcaagaatcagagcagcacagagacctaagaaaccacaacccatgcttgaatgctgttctccacagtagtagagggttagctgaagctaggagcacaaatcttacatcctcatggcttctctagtccacaaaacaggctactactgtctctgagtacttgttgcctaaataaatcagaagagaactggtctgagttggttcacatgtagcctcgttagctagtcactgtgaacatcggaaaagacttcaaagattaactgtgggtaacaaaattctggcaggaattaaggtgcacacacatccaaaatggtcatgtttcagagattcacccagggctcctttacagggggtctagtgaggatacagtaaggggtggtgatgtgtctgatgaagtgcgacgtgaaaataccaccgcactagtgcgagatccgaggggcaggaagagagggcatccgctagcagagttctgcaagagttggtgggctgaaagaggatcctttcgggaggtgtggctaaagaggaatgtgcccagggcagaactgcctatgtattgagattggtacttcatcagctcactgctctctggctgaggctgtccagctggaatccaggggcagagaagcactagagttacagtgggaaagcctagacaaatcacagagggacagagactggatccaggggctacacagagacaccaacctttccgcactgactgttgtaggggaggaattagcatgagttcttcataggagcccatgttccagagggttctggtaatgtctcgaaatacgctgtcgtttggcaggagaagaagcctctcctgtcaggaaaaaatcgaagcttctggaaggccggccagcaaagccccagcctcaagtaatataatgttgccttgtctactttccagaaagtatggaagatgacgtagacgagaatactctctaagccttaggacactgctctcatattgaatgtgactgtcacctgcctgaagaatgtctaatagcctaagatctggttaaatgctattgcagatcttgactgcccttaatcactaaggatgttttaggctgagtctcagcagataggaaaagggaaacagtgtttactttctgatttgggtatgtttgccacatagctgggttatttatttttcccttttctgtgacagaatgcctgagacaacttagcctaagaggagggaagactggtcacagtttcagatgtttgggtccattctggtgggaagggtgtggtggagcagttgattttacagtggacaggaagcagagggagaaaggaaggaatcagggacaagatacaacccccagggattccccacagtgacctgcttcctttagcttgaccccacctcctagagtttccagaaccagccaaaataacaccaacatctagaaagtctggatttaacacatgatcccatgaggatcatttatagtcaaagcacatcagtagcatttgcccctagttgcctggcctgttgctcgccctgaatacagtactgggcaaagggaggaaaactcaagctgagttgctaagaattgagagttagaggttactagctaattctgttgattctgcctggtgcaagagctcttggaatcaaccagaaagaacctgggttgtgtgggaagagtacggaaggtttaactcaagtgtacatagtgtatgcacacatagttctcattccctgtcttgagtgtcataatggtgtcgatcttttggtcaaaacccctgccttgggaggtagattcatttctttcaggcatagttttttaaaaaaaatctcttgacaatgttttattttgaatgttggaaggtcttttcctacaactaaattccatgcctcaggtaagagacgggaaggtctgtttgaggcagaggctcttccctgtgtccacaatgtcaggcactaaagtggagatgaggaagtctcctggatgactaggaaggtcctccagacaatgtgcttggtttcagtttggctttatgacaagtttcagctggaaaggttaagataacaccatacggaaaatggacatctgatgtcatgaggaagttagttagatcaccagtggtgactggtggtggtccatacctgtaatcctaacatgcaggaggctgagggaggcaagttcattccagggcatctctctctccctctttctccctctcatcattatttgaaccctcctgtaatattcatttctgtagcttctttgagagcacatggaactatggcgtgtgcttgtatttgattataaccatcagaatgctactccgatagcacagggcaatctagagcccccgctgacctgacgtggctgtgtggtttattgtcagtgattgcagaactgagatctattgcatgctaatttccaatctctagatgaactacttatcaagaacaatcatttacatatgttgtgacttacttttccttaacacataagggtgtttgtttgtttgtttgtttgtttgttttatgttcattggtgttctgcctgtatgtctgtgttagggtattgggtcctctggaactagatggggttacagaaaactgtgagctgccataaggtgctgggaattggacccaagtcctctggacaatcagacagagctcttaaccactgaaccatctctccaaccccccacgtaagggtatttcaaaggtgaacagtaagcaacttcaatacactctgcaagaacttgatgcttatgccttctctccccttcggggacaaaagtgcctcagctgcatgtgtccccttgcctacggcatgggaggaaggatacacagtccacctttgctgttgatgaatctgggttctggttcattctcagctccagatatttctcaccacaaagaaaatgacctggaaacttagttctgtgattgaacgtggtaagttcagtatccaagacccttccacttaactgtggctgcttctttctagagcatccagtggtaagaacaactcgaaaggaaacttttccagggattacaactttcttctgcagagctcatggcttctacccaccagaaatttccatgacatggatgaaaaatggggaagaaattgcccaagaagtggattacggaggggtacttcccagcggggatggaacctatcaaacgtggctgtcagttaatctggatcctcagagcaatgatgtttattcttgtcatgtggagcactgtggtcgccaaatggttctggaggcccctcggggttagtatgggggtagtggctatctgggaagtgagagtgagaaatgagatagaaagcggtgaagcctgtagggaagggatgctgggtcactgggtgggtcaccacaggcttcaccaggtggtggtgcagtggcaactgatttgtttgtttgtttgtttgtttgtttggttttagaggcatggtttctgtgtagccctggctatccctgaaacctgttttgtagaccaggctggtcttgaacacacacacctgcctctgcctcctgagtgctgggattaaaggtgtgaactacacctgacttcaatttctatttgtaattttaaaagtttttttaaattttattttatgtgcatgttgttgttgttgttttgttttgcctacatgtatggctgtgcagcacatgtataaaatgtccacaatggccagaggagaatcattgagtcctctggacttagagtgatagttagttgctagctaccatgtgttctgggtatccaacctagaacccccggaagagaggccagtgctcttaaccactgagccatctctccagtcccaagatttattttattatttttatttatgtatgtatctatgtgtgtatgtgtgagggtatgaatgtaagtaccaaacaagtttagaggaaagcatcagatcccttggagctggagttacaggtggttgtgagctatcccaggctggtgctggaagttcctccataagagcagtcaagtgctcttaatggctgagccatttctccagctccaacaatgtttgttttaatattgtttgtttgcttgtttatatatatgagtacactgtagctgtcttcagacacaccagaagagggcatcagatgccattgcagatggttgtgagccaccatgtggttgttacgaattgaactcaggacctctggaagggcagtcagtggtcttaactactgagccatctctccagcccctacaattgttctgttcagtgcttctcacggtgtttagttcccacactcatctatattcttatgaattactgaagaccttaaatagctgtcatttgtgtgtgtcatacctgttgcagattactatatcacatattacattaaaaaaaatatccaggtggtggtggcacatgcctttaaccccagcactcagaaggcagaggcagacaagtctctgaggcctggtttacaaagtgagctctgagacagccaggactacacagagaaaccctgtcttgaaaaaaccccaagatagatagatagatagatagatagatagatagatagatagatagatagatagatagatagatagataactgggtggcagaggcacatacctttaatcccagcactgggggcctagggtgaaggtgggagacaaaggcaggttgatctttgagtttgaggccagcctgatctgcaaagtcagtttcagggcagctggggctacacagagaaaccctgtcttaggaaaaacaaacacataaacgaagcatatgcacatatctatgtgccatcaggtggtgactgagaagtgatagccaggtttcctaatgaacactatgatacacttaatgcagatggcaggagcaacgtggagtttttctcatttacttacagaatcaggggacatccttcgagtgagcacgatctctggaaccacaattctcatcatcgccctggctggagttggtgttctgatctggagaaggtcacaaggtgagaggcaagcaggactcttggcagatgctgctagtagtttcctgaggcttctgttcactggatctgccacttgagttccaattagaaacagatagaccatcatgtaagaatcacatgagggcctgggacaacatttcccctctgtagaggaaacacctgttaatttttccatttgtcttagtgtgtgtttccattgctgtgaagagacaccatgaccaaggcaactcttataaaggacatttaattggggctcacactttaagaggtccagtgcattattatgatggagggaagcatggcagggtgcaggcaaacatggcgctggagtagctgattatttctgcaccttgatcagaaggcagctatgagaagtctctcctctagaaagctaggagaagggtctcaaagcccacccccaaagtgacacacttcctccaacaaggccacacccaatccaacaaggccacacccctagtagtgccacttcctgggccaagtatattcaaaccaccacaccattcttctatcccaattatatgaaagtcttctttctttgaaattcacttctcagcacatgaactgtttaaaagtcgataccattataaaataggacttgagataaggagaaggaggaaggagatatgctttagatagcatagataataaatccattcattaaacgtgtactaaatgtctgttgtataaatctattcattaaaaaacatgtatgaaatgtctgttgtgctttaagcatcatactgactcctgggaaacagcaatggaaaggacaagcaagaccccatgtcgtagagctaatggcataatcttgaaatgtcattttctatttctggtttactagttactcaagctgatcacaacagatattaatgaaacctggatcagggctcagaagctgggtgggtgagagcttgctttttcttgactgttgatgacttgaaaccaatccaggggatactatacgtgtgtggtattagttactcgtcggaaccagtccatttgctagaaaatcaacccagctagtgggtaagtaatgtttccataatcaatagagtacaatacgaatccttaacacgtcaacacatacatcttaagaagaaagttcctgcttcttctcctctggagtttgtaaattttgagttaaaaagtgacaagttctaggagaatcttgagaaagcagactaaaactgtcagtggctgcttcaaggttttgctgaatattgctaattttttgagctatgagaaagctatacagataactcactaaaaccttcttttcctttcagaactaaaagaagtcatgtaccaacccacccaagtgaatgagggaagctctccctcttaggagccacaatctctgctctcaggcatccgcatgtcttggccatactcctgatgcaaccggggactgtaaaactgagcacttgtgacaggaagataggagctacaaatttttcttcattctttggctccagaagagctgtcaacttttaggctcttgatagactcctttatcacagtcaactttaaatatagtttgtctcatgacccaatacttcccaatattgtagttctcaatagtgatttacaagtagatcacagagtatcagagccgcaagcaactttctcacctaagcaggagatgtcttctaaaatgtcatagacttgagcattagccttcactcaacattatgtgcaagttcccccattctactacaaaacagcctttcttgttcattttctctcctgagaatgtttaccatgtaagaactttgaccactatggctctcatgtttgagaatctataagtagggttgagccaacccatgaaaatagccagcaagtttctacagcagcctttgagtggacgagtcactatatacatatcatggcccaaggggaggcagaagtatccagttcatggtggctctgtcagaaagcaaggaatattgcatgtttgtctggctacatttatggcaatgacttcctttgcttttactgtttctgtgagaaattagaacaataatttatcaagctgagtgtgatgggaatcttagaagcccagtactcaggaagctgaagcaggtagattttacatttggggctagcttgagctacacaatgaaaccctatctgaaataaaccaaaacaacaacaacagcaacacacttaacagaactaaaacaatcattaccagacatattgtcccctcccatggaacggcagacctagactcacttgcaatatttcaacatgaaataatagtgtttggctggagatgtccaggtgggtgaagatgtctgttgccaagcatgtccacctgaggtcagacaccctgacccacacacacagtgaaagaaaaaaactgactcctgaaagttgccctctgacctctccatgagtgctaaactaaggtttttatttttgtttttgttttaatctgacaaaatgtgttcatatgcttatgtctcaaaacgagttctctttactctggtattggagactgaaccagtacagaaaagacaggagttagaattgaacctttgggggtttagggtgtagctcagtggcagagaattttcttagcatgtatgaggccctgaggtcagtcttcagcactttgaacacacacacatacacacaccaccaccaccaccaccactaataacaaacaaaaactaaaactttggatctttcttctgtaagtggttt

SEQ ID NO: 1795 - DNA, 2398 bp, Mus musculus
ggttgatgatgctcctgttacctctgctcgctgtattcttggtgaagcgaagccatactcggacccactcgctgagatattttcgtctagctgtttccgatcctggtcccgtcgtccctgaatttatctctgttgggtatgtggactcacaccctatcactacatacgacagtgtcactcgacagaaggagccgaaagctccatggatggcagagaacctggcacctgatcactgggagaggtacactcagctgctaaggggctggcagcagacattcaaggcggagctgaggcacctacagaggcactacaaccactcagggcttcacacctaccagagaatgattggctgtgagttgctagaagatggcagcaccacagggtttctccagtatgcatatgatggacaagatttcatcatcttcaataaagacaccctctcctggttggccatggattatgtggctcacatcaccaagcaagcatgggaggccaacctgcatgagttgcaataccaaaagaactggctggaagaagaatgcattgcctggctaaagaggttcttggaatatggaagagataccctagaaagaacagagcatccagtggtaagaacaactcgaaaggaaacttttccagggattacaactttcttctgcagagctcatggcttctacccaccagaaatttccatgacatggatgaaaaatggggaagaaattgcccaagaagtggattacggaggggtacttcccagcggggatggaacctatcaaacgtggctgtcagttaatctggatcctcagagcaatgatgtttattcttgtcatgtggagcactgtggtcgccaaatggttctggaggcccctcgggaatcaggggacatccttcgagtgagcacgatctctggaaccacaattctcatcatcgccctggctggagttggtgttctgatctggagaaggtcacaagaactaaaagaagtcatgtaccaacccacccaagtgaatgagggaagctctccctcttaggagccacaatctctgctctcaggcatccgcatgtcttggccatactcctgatgcaaccggggactgtaaaactgagcacttgtgacaggaagataggagctacaaatttttcttcattctttggctccagaagagctgtcaacttttaggctcttgatagactcctttatcacagtcaactttaaatatagtttgtctcatgacccaatacttcccaatattgtagttctcaatagtgatttacaagtagatcacagagtatcagagccgcaagcaactttctcacctaagcaggagatgtcttctaaaatgtcatagacttgagcattagccttcactcaacattatgtgcaagttcccccattctactacaaaacagcctttcttgttcattttctctcctgagaatgtttaccatgtaagaactttgaccactatggctctcatgtttgagaatctataagtagggttgagccaacccatgaaaatagccagcaagtttctacagcagcctttgagtggacgagtcactatatacatatcatggcccaaggggaggcagaagtatccagttcatggtggctctgtcagaaagcaaggaatattgcatgtttgtctggctacatttatggcaatgacttcctttgcttttactgtttctgtgagaaattagaacaataatttatcaagctgagtgtgatgggaatcttagaagcccagtactcaggaagctgaagcaggtagattttacatttggggctagcttgagctacacaatgaaaccctatctgaaataaaccaaaacaacaacaacagcaacacacttaacagaactaaaacaatcattaccagacatattgtcccctcccatggaacggcagacctagactcacttgcaatatttcaacatgaaataatagtgtttggctggagatgtccaggtgggtgaagatgtctgttgccaagcatgtccacctgaggtcagacaccctgacccacacacacagtgaaagaaaaaaactgactcctgaaagttgccctctgacctctccatgagtgctaaactaaggtttttatttttgtttttgttttaatctgacaaaatgtgttcatatgcttatgtctcaaaacgagttctctttactctggtattggagactgaaccagtacagaaaagacaggagttagaattgaacctttgggggtttagggtgtagctcagtggcagagaattttcttagcatgtatgaggccctgaggtcagtcttcagcactttgaacacacacacatacacacaccaccaccaccaccaccactaataacaaacaaaaactaaaactttggatctttcttctgtaagtggttt

SEQ ID NO: 1796 - protein, 339 aa, Mus musculus
MMLLLPLLAVFLVKRSHTRTHSLRYFRLAVSDPGPVVPEFISVGYVDSHPITTYDSVTRQKEPKAPWMAENLAPDHWERYTQLLRGWQQTFKAELRHLQRHYNHSGLHTYQRMIGCELLEDGSTTGFLQYAYDGQDFIIFNKDTLSWLAMDYVAHITKQAWEANLHELQYQKNWLEEECIAWLKRFLEYGRDTLERTEHPVVRTTRKETFPGITTFFCRAHGFYPPEISMTWMKNGEEIAQEVDYGGVLPSGDGTYQTWLSVNLDPQSNDVYSCHVEHCGRQMVLEAPRESGDILRVSTISGTTILIIAGVGVLIWRRSQELKEVMYQPTQVNEGSSPS

SEQ ID NO: 1797 - DNA, 22235 bp, Homo sapiens
cagtttttggttaaaagaacccggaaagagaaggactatgggggaactgatggcgttcctgttacctctcatcattgtgttaatggtgaagcacagcgattcccgtgagtatcccacgtcctcttctctcctaactccaaagtcgaggcagcctagaaggcacagcttttcttcctaaaacttgtggtgaaaaatatagaagccaggggcagaaacgtgtatgtattacactcagactccaggagcaatggattgcctgaacagtttcccagttcatatttgtaggattttgatgtcaccaccttctgagggagggggagccgttctagaaagactctggaacttcctcactttccctctgagcatggcctcctttcttttctgctcatattttttcttttacttttgtttctcctcttttctaacttccagagtctcatgaggatgtagtcagagtttcaggggcattaacagtggagtagatccattgttcaggtttatttatgtttttcctcctcaacacaagccctacctgtaataaaagatccaagaaagataaaaccatggctctgggtttgtttactgactgtgagaagtattaatcaagtagaagggagagtttttcattattcggggagctcaagtcactggggaagcaaatgccttctgttgcctcaaataggggaaagggcccatgggctagaaccaccaggcttctctgccctaatcacttgctccctgggctgaggactggtactggtgggcagtgtccagaacttagacttggccaccaccataggtgtgactgatgaacatgagaggaaggagttctttcaaatcacccatgcacatagagagtggaatgactgaccatggagatttggaagggcgaggggggtggatgattagaaattacttaatgggtacaatgtgtgttacttgggtgatggataccttaaagccccaacttgaccactacacaatctatgctataacaaaattgcatgtgtacatcataaatttatacaaataaaaaaattttaaatcatatggctgggagtggtggctcacacctgtaatcctagcacgttgagaggccgaggcagacggatcgcttgaggtcaggagtttgaaaccagcttggccatcatagtgaaaccccatctcactaaaaatacaaaaaattagctcggcacacccatctctactaaaaatacaaaaaattagctgtgcacagtgcgcacctgtgatcccagctactcgggagactgaggcaggagaatcacttgaacccaggaggcggaggttgcagtgagccgagatcatgccactgcactctagcctgggtgacagagtgagactccatctcaaaaaaaaaaaatccatatattaattgttcaaatattgattgatggcctactatgtgccaggcactttgggggatatggcagcgaacaagacaaacatagtctctgcttccatgaaaatttaatccagaaagtgtcatcatttatgggaaagattgggggtgagggtaagaggcagaagatgaaagaggaaaggaggagagaggcaaagggtgatatttttggaaataataaagcttatatattacctgcatgtgattctcaaagaactctccaataatatggaataatattccttaaacatattatctcctatgacaatctcactgactatttgtagtaggtgaagaaaatatccccatttaaagatgaggcctagatttttctctaggcctagagagtgaccacgctcacataaggagcaacctgaaggagactgcagatcttctggccctcggtccagggctgttccacaatgtcattgctcctttgggtgtgaagacttgtcactttgataattggggggacaggaaataaaacaagtaagttataaaggcaagggaaggtcacttggtgctggctgttctccttctgactccttagagtgcatccttctctgttctgttctgtgtccttgaggctgactgctagactgcatcacctagactctcttgcaagctgatttctgcttgggttcatacaatgggagacactgaaaggagagatgtcagagagcagggaggaaagagaggctgggatacatctttcttgctccttccccactttctgtgatgtctttggcagtagctatgttcttctgtaatgctgtcttccctgaataaccccttcttcatggttctagctcccattgggcttcagtaacggtatttgctattcttatctcttaagccctaggggtgataatggcttcccatagttgttagcctgcagatgcccatcatccttgtttgttccgttaaccttgaccatatctctgcaaggagtcccttcattaaggtctcctcacatgacccatctggcttgaaggctgtttcctgctaggaccctaactgaacattcctgggctttgagggatattggctggaaaaggatatgagattatgaaagaagactcagtctacttgatatttatgcctagtgctagccctgagtgggagctatataccagtaatagatggggaaacacggggaagagatactgcagggttgtgggtcattactccaggaaatgtcaacataactccaatatcactttcagtgtgttgctttcatcaactccacagcctgcagttgactcctccttcctttgtgctcccatggctcctgttcacagttctgtaattttccatttacaaaaatcttctctttgaggctctccttaaagacagaaagagatatcttcatttttttcttatttctctggtatacctagtgcccaacaggcacttagtaaatgtttgctgagtgaatttatgttcggaggtaatgtccctaagaaatcacagttatttgactgggagccatagagagctcgggcagtaataacgactgcaaattcaaaactgtggcttactgtagttgcaggatttgtattaaaaaggtgtttcatgcttttacaactcatcttgttcttcatttcagcctgtgtgaaactgtgaattggcgatatgggtgggtgtaatcagactgggggctggcatgagatttctcatgcattgccatatgtgatttgtatgtttcatctcgacataaccaaggtcagtctcttgatattactcataattttatggctgtataaatctgctatatcaatctacttcatgaatggtggagtccttcacaggcgaggtctgatgatggataagctccctaagctgccaactgggttactgttaaaaaacagacttgcatattatctgcttagaagtgaccttgagttcaaagagttaacatgagaaaatatgggctttttctttagactttattagatagacttcagtctgtttccatggagctgttgccaaggtatatgccatagaaatttctccaagacaatgtttcactcccctaaggccctcttcttaattggcattgaatctatctaaacttgagaaattcaactaatttgtagatttttcttttgactagttgaaatatctgtctattctcacttgaccccaatcctcttaccccacagtattgctaagagctggaggaaaggagcctaagttaaagatcaaacacatgactctttgaacacttattttagggaactcaaattgagaaagatgacaaaggatgttttttctgatgtatgaatttatatttatcggggaaaatctttcaagagtatacatattaagtcacattttgttataacttcaaaggatcattttagaaaaataaaatttataaaatcgggattttctgggaaacatgagacatatagtcatcattgtgtacagagagtactgagggaaaaaagacaccagagctcattcattcgttttccaaaactccacatagtcctacagggctcactttcttactccattcacatctctgctcaaatgccacctgctgtggtccctctatctaaaagatcaggccttctcctctccacactctcttttctctgctttacttttcttcataatctttatctccacctgaccttgtattatatatgtatttattgccaatctcctgtctagaaattatctcacagggctgggactttcatgtgttcattgctctgtttccagcagctaggactgtgcttattggacattcagaaaagaatatacctatatgaagtgagacattggcaaccttcaaaagggtagcctcagaagagtagctcacaagccaaacttgtcacagtcgccacttttatgctctaagttcctgtagttagttagacatgtcattaggagaggggactaatggttcttgctgcacatagaaccatccatgaacatggcctgagatgtgtccaaaggtccccttaactaaaaatattgccacctacttctcccctcattcccacgatgctcgaaattctaaagagtcattcccaggaatcataatcattttgaccttattaaggcattggacttcttgagagagccaataaataatcagactgtgttgacctggttatccaatcaggactcacggccacctgtgtgtaggaaggtctggagcctgtggccccagggactgggaaatcagaggcagtgagtcatccttgacacaagggggcaggagagagcagtgataatccaggggctagaagcctggcctggaaagcttcccctacactagggagggttgggtagtctcaaggtagagggacttcccatggagagatcacagtgtgattcctggttccttcacttatggattctgaggatgatcttgggcaattaatctctctgcacctattttcttttctttttttttgagatggagttttgctcttattgcccaggctggagtgcaatggcgtgatcccggctcactacaacctccgcctcctgggttcaagcgattctcctgcctcagcctcccaagtagctgggattacaggcatgcgccaccacacccagctaattttttgcatttttagtagggacagagtttctccgtgttggcaaggctggtcttgaactcctgacctcaggtgatccgcctgccttggccccccaaagtgctgggattacaggcatgagccaccacacccggcctctctgcacctattttctatctgtgggttggaattataagacctacctcaaaagtttgttagaagaataagtgaaacccatgcttatcaagggcttaaaatggtacctaacacaaggtatgtgctcaataaacaaatacagttgtgatgactatgattaagatgctgctgccctttatgcctcattgaaggcccatctgatctgccacctccttggaacatttcccagtggatcccttctcatgggaccacggtctctcttctcctagtggctggagcactccattggtactcttttctggcgcttgctgcttgttgccgtgtgtggtggaattcatttatttgttatgtgctttagctccccaataatactgtaagttcctggaggaaagagctggtatttgatttgttcttctcttcctaacattgcctccaattccttgtacatagtagacactaaataaataattgcccccatgaggccgggcgcggtggctcacgcctgtaatcccaacattttgggaggctgaggtgggtggatcacctgaggtcatgagttcgagaccagcctgaccaacatggtgaaaccctgtctctactaaaaatacaaaaattagctgagtgtagtggtgggcgcctataatcccaactactctggaggctgaggcaggagaatcgcttgaacccaggaggcagaggttgcagtgagccaagatcatgccactgcactccagcctgggtgtcagagcgagactccatctcaaaaaaaaaaaaaaaagaaaaaagaaaagaaaaattgccctcatggatgaagtgaaaacacttcatcaattattttacaatccagtgattttcacagccttttgtaagaatggcccaactggttaatggacaggttaaagggaacatgatttagaactatcaagtagccattgcacctagcctaagagtttttggttgtgtcgttcgggttctccagcactatctgtcagaagctgatgagactgggcaggagatgccttttgagaagtagcttgactggtttagacagaataccaaattctaaattgtatatttcagcttaataagtgagttgatgctgatgatctatctgttcatggaaagggagagagagacttaatttcaaaattattagggcgagaaaagagaaatggaagattagatcaaatgatatgaaattgccatttttataggtcaaaaatggtcaaatattggcctttccaaatgattcgaaatctgattatgtctgcaacaaatcctggtgggatataaattatcacaagttttaatgtactaggagagagagggtacctggacttttcctcatcttttctgttgtgagttactgactgaacatgtgtcaatcaacttcccaccacagcagaggtaacattttaaaggcccagctaaggagcaagcatgacttgttcctgtggaggcaccagatgggtaactgggcccatggcaaatgaagaggaagggactgtgatgtcctggagcagagccacgctgggctgaaccagtggtggatgggtgtgactgaaaaagcaagtccagcctttaggtgcctggactttgaagtcaaggctggctggtggagaacaactgtttcaaaaccaggcatcagaattagattgaagttaaaaaaaaaaaaaacccagaaagaaagaaagacacagccaggcacggtggctcatgtctgtaatcccagcactttgggaggccaaggcagggggaatcatgaggtaggagttcaagaccagcctggccaacgtggtgaaaccccatctctactaaaaataaaaaaattagctgggtgtagtggcaggcgcctgtaatctcagctacttgggaggctgaggcaggagaatcgcttgaacctgggaggcagaggttgcagtgagcagagactgtgccactgcactccagcccgggtgacagagtgagactctgtctcaataaataaataaataaataaataaataaataaataaagcacaatacttacttggacagtattgtcaacagaccatatttctctctatctacctcttttaacttcagataatgcaaattcttgtgaaaattacatttttataagaaagcaaagttacatgaattgtaaatattatgtttggagatgatgctggtgatacttaactggaataaatcctgctattgggcactaatgccccaagttgttaatactggaggtttttttgcttgttggcatctatcaggaatgtagacctcagagatcataaaaatagaaaacccagattccaggggatgttctacaccaacccagcttagctcagcaacacagcatctttttttcttccttcttttttctcctctccacattctctgtctggagtctgctctccgtggggattttttcccatgaaaaactatggaagtgattcctccctctttcttttcccctcactccctcaactccagccacaggcctttgtgctgctcctggaatgtgccaggcatgttctttccaggggcctttgcatggcccttcttgtccagactgctgtccccagacacctgcctgtctccccaactccttgcaggcacttgctcagaattcagctttgtgggaaaccttccttaatacgccttccttttttaaatagtgttgcccattcctctttgcagttttatttttcttcactgtactttaaaaaaattatatattttattttctagtctgtcttctccccttcccccgactagggtgtagactccatgagggcagacatttttatctgtttggtctggtacaagcttagggcctagaagagtggctggcacagaagaagcattggatatacaaatcaatattaaggaagtgtgagaactaatattcacaacttgttcctccttttgggtcctccttctttagacagttgtgtacctccagtgtagccacaaaactttccagatgtgaaaaaatagaactatttcaaaatcaattgcagaatatatatagtaccctttgcagatcccagattgcagttcaactctccattcaccagccttcccttgaatcaaagataatttttttttttttttttttgagatggagtctcgctcttgttgcccaggctggagtgcagtggcgcgatctcggctcaccacaacctccacctcccaggttcaagcgattctcctgcctcacctccctagtagctgggattacaggcatgcgccaccatgcctggctaattttgtatttttagtagagatggggtttctccatgttggtcaggctggtcttgaactcctgaccttaggtgatccacccacctcggcctccaaaagtgctgggattagaggcgacacccgcgcccggccaaatcaaaaatattttttaggccaggtgcggtggctcacgcctgtaatcccagcactttgggagaccaaggcaggcagatcacctgaggtcgggagttcaagaccagcctggccaacgtggcaaaaacccgtctatactaaaaaaaaatacaaaaattagccaggcgtgatggtgggcacctgtaatcccagctacttgggaggctggggcagggagaattgcctgaagcagggaggcagaggccgcagtgagccgagatcacgccactgcactccaacctgggcgacagaatgagactctgtctcaaaaaagatccaggttaaatagattcatattcatttcagcatatttcattattccaaaccacagaaataaagtgtttcaccaacaatttaattcacccaatatttaccaagctactaccatgtgccaagctccctgtgctaagctttgcaggaaatacaaaggaaaaaagcaaagtccctgttcttaagtgctttaagattgagaagcaggtagaaggtagtaagcagagggaaacagaaggcagaatctggtagctattggttttacgacagaactcatgctctgatgcaatctctggctcttgtttgcataagaaccaacacttttatgaagaggctctcatgactaccccagaggcttccactgtcttccctcccaacccaagccctcacccaccacaggaagggaagggggaagtaaaaggtcaaagcaatacagagggacattgggaccttatgctgccccagcctgtgggaggccagcctccatcctgttcagtattgcagctgacatgcaggataacacctgtgagggaggagcccatggggcggggatacctactctgaaccctgccaaactgctacaccccagctccaggagcaaggagaaagaagtgctaacaatgattttaattgctgggcgtggtggctcacatctctaatcccagcactttgggaggccaaagtgggaggatcacttaaggccaggaatttgagaccagcctgggcaacacagaccctgtctctattaaaaagaagtggtgacgtgcttataatcccagctactcaggaggctgaggtgagaggaccacttaagcccaggaattcaaggctacagtgagctgtgatcatgccgctgcactccagctgggcaacagagtaaaaccctgtcatacacacacacacatatgcacacacatacatacactaactagtacaatcagttgctctgggagatacctctcagggcctcttgtttttcctagtatgcaaggtaagggtaccctggccttggggtggtcagttctgaaagataacctgcacattatgagttatttcataagcagttttagagaaaagaaaaatataaacaaacttgtagcacagaagctaatccaactattttgtgagctgattttttttttttgtctgatcttttttttttttttttttttgagacagagtctcactctgtcgcccaggctggagtgcagtggcgtgatcttggctcactgcaagctccgcctcccgggttcacaccattctcctgcctcagcctcccaagtagctgggactacaggtgcctgccacaacgcctggctaattttttgtatttttagtagagacggggtttcaccatgttagccaggttggtctcgatctcctgacctcatgatccgcccgcgtcggcctcccaaagtgctgggattacaggagtgagccactgcgcccggcctgatcttttttcttaactatatgcttataaatgaggaggaaggaatgaatatcattaagtggtattcacccttgcaagattctctatagtggcaagggccaggttagaagatctgaatgtaggggaggtcctaaaggtgatggcagcagcagggtgggcaatctggaaagactggggaagtgttgtgtagtacagctcttagacacaggcaagagaagcccctggatatggccccacattcagagagccccactctggccctctgctacccacatcctttcccacagagcgaggagtgcgtgaggctgaggggaggtggtaaccctgtgtctgggcccctccactctagaccagactccaggcacccaggaacctggagttccccactcagctgactcagagctgctgaggtttacacaacaaactcgcactttggcccatcctcctaaaggtggactggctgcccttgagggccttgctaggcctgaggggtggccaagaggtgggaggatcacttaagcccaggacaagctcagacaagaggcagtttgtggctgagcctgaataaaaaagtagaggtgtttaattgtgggaggcccttggcagtgctggaaggagcaagaaacaggaagaaaaagaggtgagtctcaggctgagggccggggactggagggagacaccagctttctctgtgccgccccattcaggcccagaacttcacacagtgtgagattttttaatttgaacttggtcttcgaagccatacaaagggcaatctctcaaggtggggggatagaacatatttcaagtttgttagattgatttattccttttaaatatctggatctctggtatgtgagcctccatctgtcatctcaatttagccatgaaattttagggatgatcctgttttagggatgaaatgtttttggaggtgggttttgaggactgggaaggatttagatgggtcagaatggcaggagataacaggacaaaaggcttggacatgggcatctgcagacaccggcaggcagagtaggggaagaaagccattgtggctgcataccttctatttgccagcttttggggatggcatggggtacgtagccttctcagcctgggctccacctcccaggcatcgcctctgcccgtgacgcctgtcactgtgctccagacgtcccaggccatttggttcccatgcacgccccgccttctcgaacctcctgcttgcacatgtggtctctgccctgctccccctgcccgccctcctgcatcccctcccagcccctctgcctactcacctcctacctgtccctgagacctccctaagacatcaccttctctggaagtctctcctaagggcccacaccagcttggatcccataacactgagaggtgacagcgtgctggcagtcctcacagccctagctcgctcttggcgcctccgctgcctgggctcccactttggcggcacttgaggagcccttcagcccaccgctgcactgtgggagcccctttctgggctggccaaagccggagcccgctcccgcagcttgcagggaggtgtggagggagaggcgcgagcgggaacccgggctgcgggcggcgcttgcgggccagctggagttccaagtgggcgtgggcttggcgggccctgcactgggggcagccggccctgccggcccgggcaatgaggggcttagcacccgggccagcggctgcggagggtgtactgggtcccccagaagtgccagcccaccagcgctgcagctcgatttctcgccgggccttagctgccttcctgcggggcagggcttggggacctgcagcccgccatgcctgagcctcccaccccctccatgggcctctgtgcggcccgagcctccccgatgagcgccacccctgctccacggcgccagtcccatgaccacccaagggctgaggagtgcgggcgcacggcgcgggaatggcaggcagctccacctgcagccccagtgggggatccactgggtgaagccagctgggctcctgagtctggtggggacgtggagaacctttatgtctagctaagggattgtaaatacaccaatcggcactctgtatctagctcaaggtttgtaaacaccaatcagcaccctgtgtctagctcagggtttgtgactgcaccaatcgacactctgcatctagctactctggtggggacttggagaacctttgtgtggacactgtatctagctaatctggtggggacgtggagaacctttgtgtctagctgagggatggtaaacgcaccaatcagtgccctgtcaaaacagaccactgggctctaccaatcagcaggatgtgggtggggccagataagagaataaaagcaggctgcccgagccagcagtggcaaccgtctcgggtccgcttccacactgtggaagctttgttgtttcgctctttgcaataaatcctgctgctgctcactctttgggtccacactgcctttatgagctgtgacactcatggcgaaggtctgcagcttcactcctgaagccagcgagaccacgagcccaccaggaggaacgaacaactccagacgcaccgcctttagagctgtaacactcactgcgaaggtctgcagcttcactcctgagccagcgagagcaccaacccaacagaaagaagaaactccaaacacatccgaacatcagaaggaaaaaactccagacgcgccaccttaagagctgtaacactcaccgcgagggtccacggcttcattcttgaagtcagtgacaccaagaacccaccaattgcggacacaccaccacccataatgccaccttgaaaccactttgtctccgtcaggccctaagcttcttggacaagcggagagaagttcaatgtgggaacagcagggagggccaaacagttttgtttcattttggtttacttttaacccttattacaatccttataactagtaagtagaaaaagaataagaaaatggttaacagcagtggtttgacataataggaaaagcactgtgctttaaaaaaaaaaaaaatttcggccggccatggtggctcacacctgtaatcccagcaatttgggaggccgaggtgggcagatcatgaggtcaggagttcgagaccagcctgactaacatggcaaaaccctgtttttactaaaaatacaaaaattagccaggcatgctggcacatacctgtaatctcagctactcagtaggctgaggcaggagaatcacttgaacccaggaggcagaggttgcagtgagccaaggtcacgccactgcactccagcctgggcaacagagtgagactctgtctcaaaaaaataaataaataggctgggcacggtggttcacgctcataatcccagcactttgggaggccaaggcaggcggatcacgaggtcaggagtttgagaccagcctggtcaatatggtgaaaccccatctctactttaaaaatatacaaaaattagctgggcatggtggcacgcgcctgtagtcccagctactcaggaggctgaggcaggagaatcacttgaacccagaaggcagaggttgtagtaagccaagatcatgccactgcactccagcctgggcgacagagtgagactctgtctctaaaaaataaaaaataaaaaataaataaaataaataggccaggcgcggtggctcacgcctgtaatcccagcactttgggaggccgaggtgggtggatcacgaggtcaggagtacaagaccagcctgggcaagatggtgaaaccctgtctctactaaaaatacaaaaaaattagccaggcgtggtgaccagtgcctgttatcccagctatttcggaggctggggcagagaattgcttgaacccggtaggcggaggttgcagtgagccgagtttgtgccactgcactccagcctgggcaacagagcaagactccgtctcaaaaaaataaataaaataaaataaataaataaatttcggccaggcgcagtggctcatgcctataatcccagcactttgggaggccgaggtatgcagatcatgaggtcaggagtttgagaccagcctggccaacatgatgaaacactgactctactaaaactacaaaaaattagccaggcgtggtggtgtgtgcctgtaatctcagctacctgggaggctggagcaggacaatcacttgaacccaggaggcggaggttgcagtgaacagagatcgtgccattgcactccagcctgggcaacagagcaagactccatctcaaaaaaaaaaaaatgctcagtgcatgtgtttgtgtgcctgtgtgtatatgcccacacgtgcacacacagaggtggagtgggggtcctcatttattcaccagaggcttctttggtaaaagaagaaggctgcgtcatcagggttttcaagccttcagagttcccgagggctcccgcagggacagctccccctgtatccccaatgagtggtcttctcccttccccctacaaccatagcagcactctatattttgtctacaagttgagattacctataaaattccatcctgcatttgcaaacctgaacgagaaaggctccaagtcactggtctggagctcttacgtcctgtccaggccccggttcctgggttctgtggttctgtaagaggaaatggcagctggggcgtggaggcctgggtacagctgagtagggagcactcgtgtggggctaaatgaatgcagttgaaggatctggatcatctgggaccctacatgtcttccttctttgcctcctttccagggacgcactctctgagatattttcgcctgggcgtttcggatcccatccatggggtccctgaatttatttcggttgggtacgtggactcgcaccctatcaccacatatgacagtgtcactcggcagaaggagccacgggccccatggatggcagagaacctcgcgcctgatcactgggagaggtacactcagctgctgaggggctggcagcagatgttcaaggtggaactgaagcgcctacagaggcactacaatcactcaggtgtgcatgcggcagagacagacgcttcccccatcccaccccaacccgcagagacccctgggctggcctccaataagcggatgctgaattgcacctgctgtagctttggcaaagcctgaggaatcaggttggtggagttcagggcctcccatctgcctgtgcatcttctggactgtccctctctcccccaggagcactctgtcatttgccccacccactcttccccatctctgtatccgtatctgcatcccatttccactcaggcttctgatatgcatctccttttccattctaaatttgcccattctgcgtctcacttcctggtagtcaggcctagtgacttgcttatgagtatcgacagtaactttcccaggggtatttctggctcctgcatctctctccctcctccactgcagtcagaatagccacaaagtttatcagtcattcccattacaggataactccccaaggcgggaattagcacactcctttgacaggcagtaggtacttcacagatacctgctgacaggtgggcttccataagggggacctcctggggactcagcgatgccatggcaggcctggggggtgacataatgtagaccaaaggatgcttccagccatgcccctgctcccagcacttgagagcccacctctgtctctgtgtggacccctctgggcttctgtgtgtgttccagggtctcacacttaccagagaatgattggctgtgagctgctggaggatggaagcaccacaggatttctgcagtatgcatatgacgggcaggatttcctgatcttcaataaagacaccctctcctggctggctgtagataatgtggctcacaccatcaagcaggcatgggaggccaatcagcatgagttgctgtatcaaaagaattggctggaagaagaatgtattgcctggctaaagagattcctggagtatgggaaagacaccctacaaagaacaggtaaagagaaagagaaggcctcattcccacattgcctgaacaactgtttttatacgtaactcttttaatctaggttatatccactgtatcctgaaagccatctctttagttggcctattgtgatctcatggctagagcccccacgaaaactttccctggttacttttgagcagcatcttgacaagatttgacagttccccttgtcttgacagagtggagtacctccaagggcaccttgtttttagggatctattgaggcaaattcttccattccgtcaatgataagctgggaaattctttgggagatagagcaattcttacaaactgtttagttaacaaagggctcacacaccaccagtaggagtaaaaatctggatttaccaagacaaacagaaggtctctgctttactaaaggattaatgaggttgggcatgatggctcatgcctgtaatcctagcactttgggaggctgaggcaggaggattgcttaaggccaggagtttaagactggcctgggtaacattgtgagaccctgtctctattaaaaaaaaaattagctgagcatggtggcacatgactgtagtcccagatactcaggaggctgaggtgggaggatctcttgagcctggaaggtcaaggctgcagtgagccatgatcatgatcagcctgggtcacagagcaagaccctatttaaaaaaaaaaaaaagtattaatgataagattcctttcagcaaagagctcctcttataccttaaagatatgattcagttggtcaacttttagttcatatagaacttttcatgtatggtcttgttattcaaaattaatcacacctgtatgatgctacaggaaactcctagatacaatgtgtgtgggaagagtatgggaagctcccctctccaggcctctgtctacattcagtgtcctaatggattttcaaccttttggtcaaaacacactcctaaaaaaacaaacaaaaaaaaaaaagaaaagaaaaaacacattcctagaaaaggatcttggattaatttcttacaggccctatcaaaaagcacagtccctcctagtagcatttattttacttttaatgttggaaagcctttttctactaccaaatatcatgcctcggtaaagagacaaggaaagcattgttggagtgaaggctcttctccgtattgggttggccgatgataaggtgggggtcaggaggcaagtcagagatgagcaggaagcagtcccccccagatagtgcctttggtctcggtatggctgtttgacccaatttcagcaagaaacattaaggacaggactgtatggaaaattaagagtagtcatgaggaagcaaggtcacacgtgggtacttctttggtgtcactgctggagcccttctatgatatcagtttcttcgaaggcacaaccatggcatgatctactacatatgtttgtacctgatggcagtcatcaaaatgccagcgcaagtacacaaggcaattcggagccaaaactgagtggggatggctgtgttatttacgtgcactaaacacagaaatgagaacaaggagttctaatctccaatctattgctgacttacttattgggaacagtcacttacacattttatgggtcagttttccttgacacataaaggtatttcaaaggttactagtaaacaaccccagcacactttccaaacagtcaaagctgtatgactttccccccttagaggatggagcatgggccaactccacattcttcactacctagcaccttgccatcatggaaggtatacgtaaatacgtttgttgttgatgaacctgagttctgggtcattcttagctttagaagtttcctgcaataaagaaaaattaggaaagccagttgccaagttctaatattatatgctcagtacataaggcactttgatttaactttagcttcttcttcctagagcccccactggtcagagtaaatcgcaaagaaacttttccaggggttacagctctcttctgcaaagctcatggcttttaccccccagaaatttacatgacatggatgaaaaacggggaagaaattgtccaagaaattgattatggagacattcttcccagtggggatggaacctatcaggcgtgggcatcaattgagcttgatcctcagagcagcaacctttactcctgtcatgtggagcactgcggtgtccacatggttcttcaggtcccccagggtaaggacggggatcgtggctgtctagggagagagcctggagaaaggggtgagcaggaaaccatgctcgctgccagggaggggaggatagatcactgcctcactcagtgtgccttagaatgggtcttttaaataagtggttctcacactttttggaaccaggacgccttcatactattaaaaaattattgaggaccccagagagcttttgctgatgtgggttatatctattgctatttactacattacaaattaaaaatttaaaaattaaacacgaatgggtgcagtggctcatgcctgtaatcccagcactttgggaggctgaggcaggtggatcacttgaggtcaggagttcgagaccagcctggccaacatggtgaaaccccatctctactaaaaatacaaaaattagccaggcatggtggcgcatgcctgtaatcccagctcctggaggctgaggcaggagaatcgcttgaacctgggaggtggaggttgcagtgagccgagatcgcaccactacactccagcctgtgcgaagggagcaagactccctctcaaaaaaacaaaaaaacaaaaaacaaaaaaacacaacccaggcgcagtggctcactcctgtaatgccagtactttgggaggctgacgcgagtgaactgcttgagcccaggagttcaagaccagcctgggcaacatactgagatctcatctctacaaaaaacacaacaattagctgggcatgatggcatgcgcctgtagtcccagctactgaggaggctaaggtgggaggatcgcttgagcccaggaggttgaggctgcagtgagctataatggcaccactgcacttccacctggacgacagagtgagacgctgtctcaaaaaaaaaaaaaaaattaaacacaagaaaacacaagcagatattccattagtggtcagattgatgagtgagaagcaacagtaaggaaaatggtgttgggtttcctgatgatcacagggacaaaagtcccagaaagttaacacagaagggaaaggggacttgtggattttttctcatttgcttgctttcagaatcagaaactatccctcttgtgatgaaagctgtctctgggtccattgtccttgtcattgtgctggctggagttggtgttctagtctggagaagaaggccccgaggtgagaggcacatggaagggatccagggggctgcagactctcctgcatctctccagttttattttctgcacctgctgctccctcctccattcagaaatggcttggctctcaggctgggatcacagaaggacctgggacaaccctcccaccatgtaggggacacaaagcatggataaagcttacagggagagtggtctcttttcataggtgatgcctgacatcaacaaactagtacatctgtccaggggaactgtccccctagaagttgggtcagagaagatatggggatcttgatttgtctttttccaaaccatctttttattattaattactattgacttctggggcagtgtcctttgtttcaagacttcagtcagttttcccattttgaccaccattctttcatcccaagcatatgaaagtccttttccttgtaaattcattattcaaaacattaaatatgtaagagtagataccttcagggaatgggacttagagtaaggaaaaggggaggagaagtaggagatatataggctcttgataatgtggaataacataaattcattcagtaagtatacattaatgacctactgtgctccaggcactgtactggttgctgggatataacaatgaacaagacagatacgatccctgttttcatagagcttacaatagagcctggtaaggttatctcctggctctggcttcactaattgctcaaattgatcacaggatagtaccgatgagaccatgctttgaacccaaagtggaccagaagtttggttttccttcatagacatagacctcaactccaattcaggtgataactgtacaaaagcatgttgttagatcaaagtaaaaccaacccttttactagaaaatcagctcagaggccgggcgtggtggcttacaacttgtaatcccagcactttgagaggccgaggcaggcggatcacttgaggtcaggagttcgagatcagcctggccaacatggtgaaaccctgcctctactgaaaatattaaaaaaaaaaaaattagctgggcgtggtggcacatgcctgtaatctcagctactcaggaggctgagacaggagaatcgcttgaacctgggaggcggaggttgccgtgagcaaagatcgctccattgcactccagcctgggcagcaagagcgagactctgtctcaaaaaagaaaaaagaaaagaaaagaaaagaaaatcagctcagagagttaatgggttgttaatgttttctttatagataaagtacagcactaatcctaatccaataaatgatagtgaaacaaacaaaaaatttttttacaatgacatccctctctcaataattatacagactgtgagttcctgctttttatcttatagagtttacaaatttgagctaaagtttgtcaagtactaagagaatcttgacaaagcaagctaaaactgtcgatgcctgtttctcagattttgctgaacactgcatactttatttttgagctgtgaggaaacattcttgtaatctgactaaaaacccctttcctttcagagcaaaatggagccatctaccttccaacaccagatcgatgattgcagatccctcttttccagttctccttcctctaggagccatgttatcctctgtcccccatagagtcaagcctagtgcttgaaggtcctgacgacacccacaacatacatgagagtaatgggattgagcatttatggcagcaacagaggagccacaaaatgttctttgttctttggctccaaaaagactgtcagctttcagtctcttttgatggactgttttatcagagttgactttaaatacagcttgtctcatgacacaacgcttccctacattctatttgtcaatgatgatttgcaactagttggagattctcagagcaggaaggaatcttttcaaccagagcaggaactgtcttctgcaatgccttggacttgagcctccagcctccacttgaacaccatgtgaagggaacctcagtacttcataaaatggcctttctcattcatctttcatgggaacatttattgtacaagcgctttgaatatcatgggcaccatgactgtgaccctacaggtaggattggatcactccatgagagtagccggcaggtttctacaatggcctgggaatggactgattatttttatacattttctggcctgagagaaagccaaagtcccctgctgttcacagcaaccctgcctgggagcttggaatcttggtaatctgcccggttggatctatggaggtagtctcaccctttttgtcttttgtgggaaattaagagaaataattatcagacatatcatcacctccagtggaactacagagacctggacccagctgcactattttaatgtaaaaataacagtatggccaggtgcagtggctcacgcctgtaatcccatcactttgagcagccaaggcgggcggatcacgaggtcaggagattaagaccatcctggccaatatggtgaaaccctgtctctactaaaataca

SEQ ID NO: 1798 - DNA, 697 bp, Homo sapiens
cagtttttggttaaaagaacccggaaagagaaggactatgggggaactgatggcgttcctgttacctctcatcattgtgttaatggtgaagcacagcgattcccggacgcactctctgagatattttcgcctgggcgtttcggatcccatccatggggtccctgaatttatttcggttgggtacgtggactcgcaccctatcaccacatatgacagtgtcactcggcagaaggagccacgggccccatggatggcagagaacctcgcgcctgatcactgggagaggtacactcagctgctgaggggctggcagcagatgttcaaggtggaactgaagcgcctacagaggcactacaatcactcagggtctcacacttaccagagaatgattggctgtgagctgctggaggatggaagcaccacaggatttctgcagtatgcatatgacgggcaggatttcctgatcttcaataaagacaccctctcctggctggctgtagataatgtggctcacaccatcaagcaggcatgggaggccaatcagcatgagttgctgtatcaaaagaattggctggaagaagaatgtattgcctggctaaagagattcctggagtatgggaaagacaccctacaaagaacaggtaaagagaaagagaaggcctcattcccacattgcctgaacaactgtttttatacg

SEQ ID NO: 1799 - protein, 220 aa, Homo sapiens
MGELMAFLLPLIIVLMVKHSDSRTHSLRYFRLGVSDPIHGVPEFISVGYVDSHPITTYDSVTRQKEPRAPWMAENLAPDHWERYTQLLRGWQQMFKVELKRLQRHYNHSGSHTYQRMIGCELLEDGSTTGFLQYAYDGQDFLIFNKDTLSWLAVDNVAHTIKQAWEANQHELLYQKNWLEEECIAWLKRFLEYGKDTLQRTGKEKEKASFPHCLNNCFYT

SEQ ID NO: 1800 - DNA, 1872 bp, Homo sapiens
cagtttttggttaaaagaacccggaaagagaaggactatgggggaactgatggcgttcctgttacctctcatcattgtgttaatggtgaagcacagcgattcccggacgcactctctgagatattttcgcctgggcgtttcggatcccatccatggggtccctgaatttatttcggttgggtacgtggactcgcaccctatcaccacatatgacagtgtcactcggcagaaggagccacgggccccatggatggcagagaacctcgcgcctgatcactgggagaggtacactcagctgctgaggggctggcagcagatgttcaaggtggaactgaagcgcctacagaggcactacaatcactcagataatgtggctcacaccatcaagcaggcatgggaggccaatcagcatgagttgctgtatcaaaagaattggctggaagaagaatgtattgcctggctaaagagattcctggagtatgggaaagacaccctacaaagaacagagcccccactggtcagagtaaatcgcaaagaaacttttccaggggttacagctctcttctgcaaagctcatggcttttaccccccagaaatttacatgacatggatgaaaaacggggaagaaattgtccaagaaattgattatggagacattcttcccagtggggatggaacctatcaggcgtgggcatcaattgagcttgatcctcagagcagcaacctttactcctgtcatgtggagcactgcggtgtccacatggttcttcaggtcccccaggaatcagaaactatccctcttgtgatgaaagctgtctctgggtccattgtccttgtcattgtgctggctggagttggtgttctagtctggagaagaaggccccgagagcaaaatggagccatctaccttccaacaccagatcgatgattgcagatccctcttttccagttctccttcctctaggagccatgttatcctctgtcccccatagagtcaagcctagtgcttgaaggtcctgacgacacccacaacatacatgagagtaatgggattgagcatttatggcagcaacagaggagccacaaaatgttctttgttctttggctccaaaaagactgtcagctttcagtctcttttgatggactgttttatcagagttgactttaaatacagcttgtctcatgacacaacgcttccctacattctatttgtcaatgatgatttgcaactagttggagattctcagagcaggaaggaatcttttcaaccagagcaggaactgtcttctgcaatgccttggacttgagcctccagcctccacttgaacaccatgtgaagggaacctcagtacttcataaaatggcctttctcattcatctttcatgggaacatttattgtacaagcgctttgaatatcatgggcaccatgactgtgaccctacaggtaggattggatcactccatgagagtagccggcaggtttctacaatggcctgggaatggactgattatttttatacattttctggcctgagagaaagccaaagtcccctgctgttcacagcaaccctgcctgggagcttggaatcttggtaatctgcccggttggatctatggaggtagtctcaccctttttgtcttttgtgggaaattaagagaaataattatcagacatatcatcacctccagtggaactacagagacctggacccagctgcactattttaatgtaaaaataacagtatggccaggtgcagtggctcacgcctgtaatcccatcactttgagcagccaaggcgggcggatcacgaggtcaggagattaagaccatcctggccaatatggtgaaaccctgtctctactaaaataca

SEQ ID NO: 1801 - protein, 294 aa, Homo sapiens
MGELMAFLLPLIIVLMVKHSDSRTHSLRYFRLGVSDPIHGVPEFISVGYVDSHPITTYDSVTRQKEPRAPWMAENLAPDHWERYTQLLRGWQQMFKVELKRLQRHYNHSDNVAHTIKQAWEANQHELLYQKNWLEEECIAWLKRFLEYGKDTLQRTEPPLVRVNRKETFPGVTALFCKAHGFYPPEIYMTWMKNGEEIVQEIDYGDILPSGDGTYQAWASIELDPQSSNKCHVEHCGVHMVLQVPQESETIPLVMKAVSGSIVLVIVLAGVGVLVWRRRPREQNGAIYLPTPDR

SEQ ID NO: 1802 - DNA, 1731 bp, Homo sapiens
cagtttttggttaaaagaacccggaaagagaaggactatgggggaactgatggcgttcctgttacctctcatcattgtgttaatggtgaagcacagcgattcccggacgcactctctgagatattttcgcctgggcgtttcggatcccatccatggggtccctgaatttatttcggttgggtacgtggactcgcaccctatcaccacatatgacagtgtcactcggcagaaggagccacgggccccatggatggcagagaacctcgcgcctgatcactgggagaggtacactcagctgctgaggggctggcagcagatgttcaaggtggaactgaagcgcctacagaggcactacaatcactcagggtctcacacttaccagagaatgattggctgtgagctgctggaggatggaagcaccacaggatttctgcagtatgcatatgacgggcaggatttcctgatcttcaataaagacaccctctcctggctggctgtagataatgtggctcacaccatcaagcaggcatgggaggccaatcagcatgagttgctgtatcaaaagaattggctggaagaagaatgtattgcctggctaaagagattcctggagtatgggaaagacaccctacaaagaacagaatcagaaactatccctcttgtgatgaaagctgtctctgggtccattgtccttgtcattgtgctggctggagttggtgttctagtctggagaagaaggccccgagagcaaaatggagccatctaccttccaacaccagatcgatgattgcagatccctcttttccagttctccttcctctaggagccatgttatcctctgtcccccatagagtcaagcctagtgcttgaaggtcctgacgacacccacaacatacatgagagtaatgggattgagcatttatggcagcaacagaggagccacaaaatgttctttgttctttggctccaaaaagactgtcagctttcagtctcttttgatggactgttttatcagagttgactttaaatacagcttgtctcatgacacaacgcttccctacattctatttgtcaatgatgatttgcaactagttggagattctcagagcaggaaggaatcttttcaaccagagcaggaactgtcttctgcaatgccttggacttgagcctccagcctccacttgaacaccatgtgaagggaacctcagtacttcataaaatggcctttctcattcatctttcatgggaacatttattgtacaagcgctttgaatatcatgggcaccatgactgtgaccctacaggtaggattggatcactccatgagagtagccggcaggtttctacaatggcctgggaatggactgattatttttatacattttctggcctgagagaaagccaaagtcccctgctgttcacagcaaccctgcctgggagcttggaatcttggtaatctgcccggttggatctatggaggtagtctcaccctttttgtcttttgtgggaaattaagagaaataattatcagacatatcatcacctccagtggaactacagagacctggacccagctgcactattttaatgtaaaaataacagtatggccaggtgcagtggctcacgcctgtaatcccatcactttgagcagccaaggcgggcggatcacgaggtcaggagattaagaccatcctggccaatatggtgaaaccctgtctctactaaaataca

SEQ ID NO: 1803 - protein, 249 aa, Homo sapiens
MGELMAFLLPLIIVLMVKHSDSRTHSLRYFRLGVSDPIHGVPEFISVGYVDSHPITTYDSVTRQKEPRAPWMAENLAPDHWERYTQLLRGWQQMFKVELKRLQRHYNHSGSHTYQRMIGCELLEDGSTTGFLQYAYDGQDFLIFNKDTLSWLAVDNVAHTIKQAWEANQHELLYQKNWLEEECIAWLKRFLEYGKDTLQRTESETIPLVMKAVSGSIVLVIVLAGVGVLVWRRRPREQNGAIYLPTPDR

SEQ ID NO: 1804 - DNA, 2007 bp, Homo sapiens
cagtttttggttaaaagaacccggaaagagaaggactatgggggaactgatggcgttcctgttacctctcatcattgtgttaatggtgaagcacagcgattcccggacgcactctctgagatattttcgcctgggcgtttcggatcccatccatggggtccctgaatttatttcggttgggtacgtggactcgcaccctatcaccacatatgacagtgtcactcggcagaaggagccacgggccccatggatggcagagaacctcgcgcctgatcactgggagaggtacactcagctgctgaggggctggcagcagatgttcaaggtggaactgaagcgcctacagaggcactacaatcactcagggtctcacacttaccagagaatgattggctgtgagctgctggaggatggaagcaccacaggatttctgcagtatgcatatgacgggcaggatttcctgatcttcaataaagacaccctctcctggctggctgtagataatgtggctcacaccatcaagcaggcatgggaggccaatcagcatgagttgctgtatcaaaagaattggctggaagaagaatgtattgcctggctaaagagattcctggagtatgggaaagacaccctacaaagaacagagcccccactggtcagagtaaatcgcaaagaaacttttccaggggttacagctctcttctgcaaagctcatggcttttaccccccagaaatttacatgacatggatgaaaaacggggaagaaattgtccaagaaattgattatggagacattcttcccagtggggatggaacctatcaggcgtgggcatcaattgagcttgatcctcagagcagcaacctttactcctgtcatgtggagcactgcggtgtccacatggttcttcaggtcccccaggaatcagaaactatccctcttgtgatgaaagctgtctctgggtccattgtccttgtcattgtgctggctggagttggtgttctagtctggagaagaaggccccgagagcaaaatggagccatctaccttccaacaccagatcgatgattgcagatccctcttttccagttctccttcctctaggagccatgttatcctctgtcccccatagagtcaagcctagtgcttgaaggtcctgacgacacccacaacatacatgagagtaatgggattgagcatttatggcagcaacagaggagccacaaaatgttctttgttctttggctccaaaaagactgtcagctttcagtctcttttgatggactgttttatcagagttgactttaaatacagcttgtctcatgacacaacgcttccctacattctatttgtcaatgatgatttgcaactagttggagattctcagagcaggaaggaatcttttcaaccagagcaggaactgtcttctgcaatgccttggacttgagcctccagcctccacttgaacaccatgtgaagggaacctcagtacttcataaaatggcctttctcattcatctttcatgggaacatttattgtacaagcgctttgaatatcatgggcaccatgactgtgaccctacaggtaggattggatcactccatgagagtagccggcaggtttctacaatggcctgggaatggactgattatttttatacattttctggcctgagagaaagccaaagtcccctgctgttcacagcaaccctgcctgggagcttggaatcttggtaatctgcccggttggatctatggaggtagtctcaccctttttgtcttttgtgggaaattaagagaaataattatcagacatatcatcacctccagtggaactacagagacctggacccagctgcactattttaatgtaaaaataacagtatggccaggtgcagtggctcacgcctgtaatcccatcactttgagcagccaaggcgggcggatcacgaggtcaggagattaagaccatcctggccaatatggtgaaaccctgtctctactaaaataca

SEQ ID NO: 1805 - protein, 339 aa, Homo sapiens
MGELMAFLLPLIIVLMVKHSDSRTHSLRYFRLGVSDPIHGVPEFISVGYVDSHPITTYDSVTRQKEPRAPWMAENLAPDHWERYTQLLRGWQQMFKVELKRLQRHYNHSGSHTYQRMIGCELLEDGSTTGFLQYAYDGQDFLIFNKDTLSWLAVDNVAHTIKQAWEANQHELLYQKNWLEEECIAWLKRFLEYGKDTLQRTEPPLVRVNRKETFPGVTALFCKAHGFYPPEIYMTWMKNGEEIVQEIDYGDILPSGDGTYQAWASIELDPQSSNKCHVEHCGVHMVLQVPQESETIPLVMKAVSGSIVLVIVLAGVGVLVWRRRPREQNGAIYLPTPDR

SEQ ID NO: 1806 - DNA, 68592 bp, Mus musculus
  misc_feature (1)...(68592): n = a,t,c or g
gggccatgctcctagtctgcccgtgcttcttcctcctggtggttctgggaacccgctgggcgggctggggcagccaccaggcagaggccgcgcaactaaggcagttctatgtggcagctcaggggatcctctggaactatcatcctgagcccacagatccaaggtaactgggggtgaaatccaggtgggcttcttcaaggaagaaaatctattatagttgcaaggggtgggggtgggctgggaggaggaggaaaaggaaaaggaagaggaggaggaggagagagagagagagagagagagagagagagagagagagagactaatgttgtgtgggtgtaattttgtctctatggacataatttatcattttgaggatgtggaaatttcaatgtgaatggttagctgtggctttctttccaggtgcaatccctaatctgttttccccccacgtttgttagtttagtgtattgatgggttgaaaggacacacctccacagccctcttagcccttcctgtgcattcggcttaagccttttgacagtctgcttaaaaaaaagaaaaaggaccttctagttatataatatttattcctgttaaacacaagttcatcttctaaagaaaaagatgtcaaagctgtcaccatgtacttcattataaggagattttgttgccttcctataaacgattttcactgtgggttcagagggaagggaaggcacacttgtattttcacttttcctagacttacccctggctacctaatgtggcttcattttttcctctcattttgagttacttcctggaatatgacttatcctgggtattttggtctgccctgattattacccatgttagtgagcacataaggtagtcattcaaaggcatgtctaactaagaggaggcttaaataatatcaaacctaactttgagttgcagaatatattttgctaacctgcctgcagttacccaagtcatagattctacgtagcacttgcgaccacgagtgtttttattttaaatgctaagcctcgcttactggttgacgcatttttttcccttttagttgacatcaaagtttaagtgattgtgaaagatgtgttcctcttttacaattgcaaaaccaaagcaatcagccaaagaaaataatgtaatatcttgaaagcaatgtgtaatgttttagtataaatgaataatcagcctttgagtttgctgttgttggttctgggttgtttgggaaggcattgtattcagtcttggtatcatgctagtgagaaatatcacatctaaatgacttaaagattgcattttcagagtaataatctagaccacacccatactcttaggaaagtaccactaactgaacacctccaccccaccccaatcccaaaagaaaataacattatttccaacatcaattttgctgcttaggggcagagaacacagacttgtgttcaagtgactgcattcagcctggggtaaggcaaaggtaggtttgagttaacacaaggttagagatgaacaaattccgatcaaatgcacagcatgaggactctagctaacaacattgcacaggtcttcccctggtaaggaaagagaagtgggtaagttaccagtagggaaaactgctaaaggaagtttcccagggtcttcatccctcctgtgaaagatgtagttatcaagacacctgaccttgttgactctagacatagagactggagcggacacctactgggtcagctaaagctgaggaaatggtttaaccctccaggatctttatcaggagggtgtttatcctctgcatcttctaaggaagcgcctttatcttcccaatgcaggattttttctaatacaaatcctagagttttgccctactgctgtctttgctttcccaactagaggcaggctccatcagatggacaccaattcaccacaccttctagtcattcaaaaccacggaatgaaagtggaaaacgtttctaaatgatgtctgattcatcgactgagaaatggttcacatacacttctcagtgacttatatttttaatttagacctgaagttcgagtttgtgtgacgagcttaccatcctttatagaaaaaacttgactctgaagagcagacttagagaagcactgggcttgtgttcatgggagcatgcacactgaggcagaatgtctttgaaaagaccaatgattatcccattgacttcacttgtgatccaaatttataaaaccctgggctttggaaatacaataaattactgtcactttgctcttcaacaaaaatagtcacatagacacctttctttctggaatagaaatagatagatattatatgactttcaagttcgtttctgtactttatttccagtttgaattctataccttccttcaagaaaattgtctacagagagtatgaacagtattttaagaaagaaaagccacgatctagcaactcaggtaagcctacaaaatatattttttaaattactattatattggtgtttggacctaaaatctaataaacgctaaggaaaaagaaaaaaaaaaaaaacctctaccactgatctatatccctggtctacatctaaatttttattctgagacaaggtctctggggaagactatgaattgtgatttttctgtctcggattctcaactagatggcattataggcctgtgccaccagacacagcctgtagtttttattttaaatataatttttcgtggaaaatattgtattctttatacttaaagtatctacattgtgaactggtcagatggctcagtggctaaaggtaattgctgctaagcctgaagacctgagttccatccccagttccatggtagaaggaaagaatttaatctttcaagttggcctctgatctccacacatgcaccatgatacaagcacacaaacacaccccaaaataagtaactaaatattcatttagttatcttccattataggatatgtgatgtttttgtcaaacaccagcagtataatatgtatgctcagacccagtgagaatatggggctcttcaaattattgagaattttgtagatggtgaaatctaaaccaaactgcagtttttctgagcatggggtaatgtggaattgaacaggtcacatgttacacagccagccatgcctttagcctcggtcaataaagccaaacaaaaagtttcagtgtttcactttgtgtttattcatctagcaaaccacaggtgagcaccttctgcgggcttgacggtgaattaggcactatgagcaagcacaagagtagacaaagtaaacttagactttccttagttggctaggcactggtgtgccctaacagaatgaatttgctattgtttctatccagcttcctgtacccattcaaaggagctacatagatttgatcctctgcttttccaatagctatggcatttgaaggaaacctctcttctttctttctttcttttttttttcttttgtgcttccttaatcaaacactaacttattgagggctctgagatcttaactatacgaacctatttcacaggaatgacagaggtcatctccagggagagcatcttccagttgcattctttaccattagtttgctcaccttctcccagcctggtgatgatctgttatccatcctaggctcatctcctgcctcttctcctcccccaccccttccacctcctgctctcacctttgtcctctggtctctttcactcttcagttcttcctcaaatcaaatcttttccttctgaaaaaaaaaatcaccaacagaatatttttcaggtaaatcttatctagaaaaatgaaaatatctttctgttcctttaccactctctctcaatgcctccactcttcccttgctctccaaagtcagccacaactgtggtttttacagctacttacccaggagccatgtcctttaggacagagcttggattcccaccctagcctggctcaagtaccttttctctcttctgtatactcccagcaccctgaacttgcgcttgcctgttagagatgctgtgaggtttaacgaatacaaagtacttatcctatgctcaaacatgacaagagcttagcagaagttaactacattattgttattgctgctattccagttatgaattaggtctccatgagagcaggcctatcataatattgttgatatgtcaacacaatatttttgctcatttttatcttcttgtgccttataatttgtatatttatttacttttaaataaagacagttaagtattctgttaatgatcacaacctaggaacgccacctctgaggctccgtaaaggtgaattctgactttctgtcatctgtcagctggtagagatgactgcgaatggaacattatagcacagtgttaaggaagaacaatacggaacagtctccactttagtggtgaggagagagagaaaaccgggattgggaggccagacgtgggtgtgggttgggtataaagatgcattttagaacagaagtggagaacatgagggtttagatcaaaggttcccagcctctgggttgaaaccctttagggattaaatgaccctgtcacgggggagactatcaaaaaacacaaatatttacattatgattcataggagtagcaaaattacagttatgaggtcgcaatgaaaataattttatggttgggggggtcattacaacatgctgaactacattaaaaggtgaaagctttgtcttgagggaaatagagggacactgagatcatttaaatgggagagagtaggatccaggttagcattttaggttctgctttcaatattgctctatgagtgtgaaccaactgcaatgccacacgtgtaggaaaatgccatcataaatgccattgttccccatgctaactgaaaattaattaaaagctttgttctctccaaatctggaagctggattcgcgggcagagaaaatggtaatgtggctttggtcccaatccaggaaacaagacagcagggaagctggggtggagaacattaaatggattccaaagatacttaggagctaaaatcagccaaacaggtagttaattggatggagacaagagaagggaattatgactgacatcaaagtttctggattgagtagtaaaatgtagaatgtactgtgtacaatgtagaatgtgccattcaatgagaaagagaactgaaaaaaaaaaaaagaagaaggatgcttgtttgggaagataatgaggtcagatttggagtctggggtagaatgtagaatgtctacctagtgttatcaaaggagcaggtgggtataggagttttgcttttaggtaggagaactgagctagatagatacaaatattcaggagacatcataaccaggttacaaaggaagctctgagggggacacacaagatcactcaagggaaatataatgagaagaggaggctataaacagagctcaaaggagcaacagagtccaagggataagccaagaaagcaatggtcaccaaaaagcttaagaaagtcttcctagagagggtggaggagaggtggaggctgagattccctggaagcagagacaaatggcacaaacagcaatcagtgctcatggagagggccataaagcctgctttctgcagcagtagtgggctgagaaatgaggacagggctctggggagtgaatggcaggtgaagaaatggaaacagacagaaagaataattcttcctgaaagttctggagatcaatgagagattcaagggtatctgggtacagcccagggatgcgatgtttactgactcagtagaaaagctacctggggggatggataactgatggatctagatacagaagaagcaggaagtgctgccattaaaagctgttccttaagtggaaaggccgttgtcctcgctgggagtcccagggtggggcattacgtttatactccagctcagagttgagcgtgttcaatagattcataagaaccatgcaacttgtaagtaaatgagaacagattcgccaggccgagaagagaaggcaggtaggtattcaaagctgaatgctctgtggctttcgccaggttcaccaaatattgatgtcattgccaggcaatgtattgtgctggatgcacagtgacagaaagggccacggccagggtggagacttttgaactgacagaagaaggcaccggtaggttttctgagagagagaccactgtggcagatgtcctgtcagatgtcttttgtagcgagttcctgagacgcagccttgttagtcagaagaccttgaaggctggtgagaacagcctggaccttgtgtaaaccctttcgctttaaacgttagtttcctgtcagagcctgtgcattgaagtatatgtttaatgtggggcaactggggaactgaaacacctctttttatgcagtcccttcttaaactcccaaggatgcagagctggtgagaaaggaaaggtgcagaggatctggctgaggtctgattgagtgctagttagtactgcctagctctagccctgtgttattttaccttccctgtgtgtttccttttccaaacacttggggtgtggttctagctgagctcaaacaagtcatggctcttcagccctgcagtaacaggagtccagacttagtttactaaattgaaagcagaggcagttgtttggggtagtctgaaggtgacagacatcctaattaggtttgtggacagctagacagttgggagaggccagacgcagtttcaggaatccaacttgggcttcaaagcattgaatctccacgttttttctaacggaggttgtgaaatccatgtccccagatgagctttaattgataactgcagctgtcttgtgtgatataacaatttgttcagctgagagcaaaggatccgattaactcatctactgtgctcttgccagttcttcaactaaatgagactggctactggctatacagtcttctnnnnnnnnnnnnnnnnnnnnnnnnnnnnnnnnnnnnnnnnnnnnnnnnnnnnnnnnnnnnnnnnnnnnnnnnnnnnnnnnnnnnnnnnnnnnnnnnnnnnnnnnctaaccttccttccctcccatcaaaccatcagtggaaagggcttagactttgtggctggggtaggagaagattctcagccttgggtctgctgtgtgcactaaggtatttgagtcacagttatgaaaacatcctttagttgagccttaattataaagaagcaggaagggagttaaataaataccccaaactgtcaaaatgcccattgaagtaagaggtcttactgggtcaaataacctaggaaggtttttcttggcagctggcatttgttgccatgtgatagcaacaaacaaataaccatgcaagagaggcaggacaacaaaataccgtgacagtgctgccggtaagtactggcctgtgggcagtctggacacgttgagcttccatggtaagccgggatgaaaggtaacattcagaagacagggtcagcctgtgaccctgaagaagaagagaaggtcagaagtcaaaagaggagcccacctggactattctaggaaggccggggtcttaatttgcccctaaagaattagagagacgtttttcttgggagttccaagacctggattctagtctcagcaatgccagggagccactgaccaaccctgggtgagccaatccccactctccatccttttctccacatacatagccaagctttgttaactatctctaactgaggcatgaagaatgtggcctccatgatcttgcccagagtcaacagaaaaacaaacaaaaaagctcctggcataaaaacaatataaaatttaagatggatgcttccacaaaaggaacaggacaagagtggccaggaagataggagcagagaaggcagggacaggatgacagttgctagaaagataggaatggagaaggcaggaacaggatggcaatggcaggaaagataggcagagaatgaagagacagcaccagaatagagagatgggagcggaccagggaaggccagacttctgctgagctgtgacaaattgccacacatttagtgctttggaaaaaaatgaatcagccagatgtcctggcacatagctataattcctgcattgggaagcccgaacaataagatcatgagtatgacaggacagcttgggctacatgacaagactctgcctcaaaacatgagtaacttattcttctgttaacagttacatttctggatgtggaggatcagagcaggattcactgggtttaaatagaggtgttggcagagctctgtcccttgggaaacccccagagaagtcactctcttgctttttcctttcttagagctgcctgtgtttgttgacatgttttctccttctgccattttcacagtcagcagagtggcgtcttctaatttccttcttaagcttctcttgtgaccctttagtgtgtatccttgtgactatgtaaaacttacctggtgacccaggaaaatctcagactcccgtaattaaccattaatttaatcacacgtacagtcccttttatcactcaagacattgcggcatggaaaggaggaccattgttctgcacaccacacacacctaacagaatcatcacatgctatcttccatcctatagcatgtcaccattgtctacacagctcccaggcagatccttgctagcactataacaccttgttggccccacccctattccatagccaatacattctaaaactcaaaggtttcatttctagcatatatatctggtattttctttgtggaagacttccactatgcccttcatcttaccagtgtctccttcagagccttctattagtttctaccccagtttctccattgaaaagcaacagaaaagttaaacaaaaacttcttaaaagtctgagtcatgctgtatcctgctgaaaaaacttaacagcctcactattatcagatgaaaaacaaaattccaaatgttctacctgaccctcagttgggccgaagatgatggtgcctatggtgtttctttcaatgccttgctctcttagctactaagtgcttcagtggccatcaatttttccctcagtggccaagatttctgttgtctcagagcctttgcacttgctgatctcactcacccatctctgtgttcctctgtctttgcacctcatagaaagcatcactttctcagaaaagtgtttggcagccctgacccacttcctagtcacaagcctggaacagacttctctctgcagtgcttgacagcagcagtgttcccatcagctagagctgcccgtgttttttgatacacgacccttccatcttcactcttctgagaagcatcttccttgatgttattccagtttaaaattaaaaacctgtgtgattgttagaatgtttctcttgatatttctcatcttgtattgtctacttctcatctatgcatcaaccacagtctgatgatatctaagacagtatgagtacttagtatgtgatagatggatggatggatggatggatggatggatggatggatggatgcaaggcgtgaggtgctgtataaaaagatggcttaaaactcagtacctagagtctggtagactaaagtttaaatcatagctttgccttttgttgcttatgtgatttggaatctggggcaaactatctctcaactctttgggttaaggccaaggatttgcctttcagttcttatatgataagtcataatggagttgatgacaaagattacaaataacaaagatttgagagaagcaaaccaacatcaggaccaggaggagtgacaacaatcgtctcaggacctttctacatgttcctcttgcttagtagctgtgtctttcatgatcttgaatataagcgatttcaaacttctcccttaggacttcttggacctactttatacgctgaagttggggacgtcattaaagttcactttagaaacaaagcagacaaaccactaagcatccatcctcaagggattaaatacagtaaattttcagaaggtaagatgaacttattaaccctctgacaggagaagaagatcactttaatatcattgctaaatattaagactggtgttgttaaccatacactcttagagaaaattcttttcctgaaaattgtaattataaaaattgaactgctttcagtttcagagaggaaaacaaatggttttagagtcatctaaacactgtgattgtgttaggttcctgttcctggtaaggtgggttggaaaattacctcatgtcaatgaatctctccattccatatgttcatcttaaagtggaaataacaatacattctaggatggtttaagacagattcgatgtttccatggtaagtacaagcaagactcatcaccaggcggataagtgcagggcaaatggattgtgcttgaactccatggccactgtgcttcccttccctgctcctgtggcttctcatgggcataaacaaaccccatggtaaggcagggtgagcaaacatttttttaaagccagctactaaataaattaatacactcggctttgcaggcaataagatctatgctgtcctggaaagaggagtttccagttgaggagttaccttcattcaatttgtttgtgagcctatttgtggagcattttcttgactgttaactgatatgggagattctagctcactatgtatggtactatccctgggcagtgagccccggctgtataaagaaaggaagctgagcaagccagggcaacatattcatgagcagagttctaagtggtctctgctccggcttctgccttgagttcctgccttggcttccctccataatggatggtagcctgtaattgaggcaaacttttggtcagtgttttatcacagcaacagaggaagaaatcgggacagttggcaagttcctggatgagacggggtgcccaggggtctcttctaggttccccagattcatacagtgatgagcctacttactgggtttctaaactagagctcagccatacagagtaggatagagcaacatgcccacacagtctctttcaagttccactcccagcgtgggagaaggtaagagttgtggactctgcccctcagctcagctgtttgcagagggaatggactttgtgacatcgttcatcctcctccaatgtttatttgatcccccattactcagtcagcaatcactagtgagataaaattatcgaaaatgtacccacacatctgtgctagcacatatagcattgcatatgcatgcctgtagtcctagaagttcaaaataaaaatggtaaatacagatatgtgcgaaacataaaaaaaaaaaaaacttccctagaaaacaatatgtaatcttagttcagagtttctttcatgaagagagaagtctattgtgtcacgcccctctgtgttaaaatacagtctctccgcatctgtgtcagcactgaccgttgcctattgtctacctctatagttagacctacttttgtgaggataaactagctacatggtgagccagctctatgagagtccaaattctttctcccaggagtaaatgttcaccaggcagacagtgggggacagagataacagacataggtttgagagtctatggttgcaggtagcttaaaaatgggctccctcccctgtttgtcagaacacacaaactgacttatagaaatacaattcctttctaatggtattttaagctttgtatcgagtctgggaagacagctcagcaggtacagttgcttactcaacaagcatgaggacatgaatgcaaatttccagaactcccatagaaagcacctataacatccagtgcttggggaaggggaacatggggggtggagagagaaggcctgtgaggcttgctggtcaccacctgagcttcatgtttactaagaatctttgtctcaagggactaagggcaagagtggccaggtcttcaggtgttctctggcttctacccatgcacaggcaagtgtacctgctcatgtgcatattcaacacacacacacacacacacacacacacacacacacacacacacacacactactttaaaaccccaattttctgtcactaattttaatctgaatgaaattaatttgatttccaaaaagtctataaatagcatacattacactaaggttaaggtcatgaaagatttttgtgatccaaagactttgaaattttgagtgattgttttaagaaagcctgtttcatgataaatcttaatattgctgttgttctttcttctctctatctttctgtctctctccctctccttccctctatgtcttcatgtgtctctgtctctgtgtgtctgtgtgtgtgtgtgtatgtgtgtgtgtgtgtgtgtgtctgtctgtctgtgtgcatgtgcacactaaggatgagacccagtatctcaaaactgctaggcaagcaccgtcccactgaactccattcccagatccttgatattattctttcatttgatttatattcttgatctatctgtggagttgctttgtactatactacaaaattatttttagacttatataaaatgcattaaattatatttaatattaaaattctattacatttagtcacctactagtaagctagagtcctaaacttaaaaaaaaaaatccaatagagcttttattttgcatctaagtactacaaaattctgtatatgaaaagttagttctcggctccaacatgcccaggatcagagaatcagaggttaggaggacacaacatctgacccaacaccaggagtaactgggaccggtgggacccaggcacgcaggaactccactagaccagtgatggaggttccttccagtctgtctgggctggtaccctgagcagaccttgggcgcaaactctgcagccagccccacaacaccccgaggcagctccactcccaggcactctaacatacccaggatcagaggatcacaaggtcccatgaacttagtcacaccagaatctcaaggtcccaaaggcagcttgactcccaggaacttggacacacccaggatctcaggatcacaggatcccagaatcacagtatcacagagacagctcgactcagaggagtgctgacacaaccaggatcacaggatggacggctccagtcagatatagccagagcaggtagcactagagataaccagacggtgggaggtaagcgtaagaacataagcaacggagccgggcgtggtggcgcacacctttaatcccagcacttgggaggcagagacaggtggatttctgagttcgaggccagcctggtctacaaagtaggttccaggacaacaacggctatacagagaaaccctgtctcaaaaaacaaaacaaaacaaaacaaaaagaacataagcaacggaaaccaaggttacttgggatcatcagaacccaattctcccaccacagcaagtcctgaataccccaacacactggaaaatcaagattcagatctaaaatcacttctcatgatgatgatgatagaggacattaagaaagacataaataactcccttaaagaaatacaggagaacacagataaacagctagaagccctaaaagaggaagcacaaaaaccccttaaagagttacaggaaaacacaatcaaacaggcaaaggaatggaacaaaaccatccaggatctaaaaatggaactagaaacaataaagaaatcacaaagggagacaaccctggagttagaaaacctaggaaagagatcaggagttatagatgcaagagataaaaggtgcagaggatatcatagaaaacattgaaacacaacagtgaaagaaaacacaaaaagcaaaaatctcctaacccaaagcatccaggaattccacgacacaatgagaagaccaaacctaaggataataggtatagaagagagtgagaattcccaacttaaagggccagtaaatatcttcaacaaaattatagaagaacacttccctaacctaaagaaagagttgcccatgaacatacaaaaagcctacagaactccaaatagactggaccagaaaagaaattcctcctgtcacataatagtcaaaacaccaaatgcactaaacaaagaaagaattttaaaagcagtaaagggaaaaaggtcaggtaacatataaaggcagacctatcagaattacacctgacttctcagcagaaactatgaaagctagaagatcctgggtagatgtcatacagaccataagagaacacgaatgccagcccagactactatacccagcaaaactctcaatcaccatagacagaaaaaccaagatattccatgacaaaactaaatttacacaatatctttccacaaatctatccctacaaaggataatatatggaaaacaccaacacaaggaggaaaactacaccctagaagaagcaagaaagcaatctttcaacaaactcacacaaacataattccacctctaacaagaaaagtaacaggaaataacaatcacttttctttaatatcttttaatatgaaaattaatatttccagcatatcctaatcgattgaaattcaaaaacatgaggaattagaaatttgtcagctgtcatactgtggtctctttaatttggtaatgggagaaatatgtccaatattatacaatccatatacactttctgcctgttggcacatgacagggtcttgttgtgtgccacataatggtcttgaaatcatgcttctcctatctcagcctctctattagtaggattgtttatttgatgtttttacactatactatggttttcagaacagcttacaaatttcaaaattatttatacagccaaaagaaatgtagacaattaatttgggaggtggcttataagagaacagcaaagagtgagactgaaggctttgcttgatatttataattattgtatcaattttgaagaagaggactttataaataactcttatctgagatgaatgcttttcaaaatcatcacagccaatgaaccagaaccttaccctcacctaacatctgtgccaccctccaagcagaaccattgttcattgaaatagttgatgaatgacttcatggatagatcatcttaatacacacaccatttcttaaatgaatgtaacctgttccctgtgggctgagaatgatgacaatcactcaagtcaaatagctttgactgtagcgggaaatctgtatccaaaaatcgtgcctacaattcattccttggtgtagcagaactgtcaactcttagcttatctactatggaggtaaaatcctttggtgatgtgagggacattcaaatacagacttattacaatgcactccaatgtccaaaaactgttcttattttgtgtgtgtaccacagtaagagccaagattttaagctctactaaaaacaaagcaaacaaaaagactttatttatttatgctcatttcagaaactaatagtgatatattattttaaaatatcatacagttaatatatttggagtgatttgaaatttatattgagaaaaacgtgtgtattttcagtattgctgtagacaagcatctacataagactgttcaattgattgttgttttatatcaaactacttttataatatttttattgttacaatattttataaattttaaagaatatgatacaaaatgaaaggtattacaggttttgaaggggggctctccgggaggagttggggtacaaaaaggaaaaaagaatgtgatgtaagtctatttactcaaaatatgttttaaatgttaacacattcagaaaagttgaaattatgtattgtttctcatcataatgctataaaacttaaatcaaaaaaaaaagttagttctttagaattttcataacattcaaaccttaactcagtttattttttaccaagtatgaaacaaattataatgattaatataaaagttctcataaagcacaaaagcagcattttccattttaaaaagccctcatatgtctacgcagcgaaatcaaattcattatacaaaaccagcattaatttgcccattgttcaatttatagcttccaaatgactgttctgtttctttgcatgcacaggggcattcactgtgtttaataaacaggagggggaaattcacacaagagtaataacagctaatgcgtgagtagcccgaaggataacagaaccttacagaacttcacttttccctgaagcttgcatgcaccacttagcacttaaaaatgtactggggggtctctctgaaaataattcatacagcatgacagggataaactcattataaagttgactggactgagcaagaaagaactgaacagaactgagcagatacaaaatgaagaagacctcttgtgtaagaagtttactctgccacaggatggacgaggacctgtgtgttctgtcacaacccatcctgtccatttctcttctttccaatttagaattttaactttatttggattacaaagtcaaaataagatttatttaaaaaaaaacacacttcaaaaatgcttcctctaaaatggctgtttctattttatttcatattgtgtaggttacagaatgagaaatatagcacttgtgttttattctggagaaaaaatagtgtgcaatgaaaagaataaaaacattgataagttatcttctaatacttttaatgatagtcctgtgtgtactcacagaatactttcatcccatgtacaaatctatattgtttgctatatgtttcctggtgcccacaattcaccctttaaacaattaaaattaccattcaagtatacaaaacgctatcgtacattatattgagaagtggaatttttcttttggatatccatttgtgttgccatatcaaccttttcagtacctgcatgcgtgacacagaattctgttttgtacggattttaaaactcactgggagttacagttgagtgtgagccactaaactttcacaaataaatttgatgacacaggaaaatcagtcaaacacctagaaggcaattcttacataagttcctcttcaggacaggcagtatagaatgctatgattatagcctccgaattgaatagtcatggggaaaaaaacaggtcaacgccattgcaagcatcatgtgtttaccctggtctcttgcatctgcacctggcatagagcccaggatgcttggggtggtggtgaaggccgtgacaatcattgttgaactaaactgaaggaatgaggacttatgagaaacaaggacactatattatcctccctgcgctcagaaatgtattgtcagtgagcataagcagttatattgtcttattaccaattttcctcaccctaaaatacatacattactgatgtagattccatgtgtgtgtcttaattttttcacatgttggaaacctgatccttgatgagaccatataaggggtgggacctttgggtgggactcaagacatagagtcataaccttcatgatgaattttgtacccttagaaatggaacttagggtgaagcgccttcagcttctatgtgcctcctgagaacaagatgaaatgaggtcccctgtaccaaggagggcttcatgagagcactgtcatgttgaaatccatgtctcgccttaagatacatgaagaatggcttgcttagatgccacccaagctagggaactctgttatagaagcctagaaccaacccaatctagtctttctcagatgtgttagaacacaagagcacttgaatattttttcatctaaacatagggtcagatctgtaatgctcagactcgagaagctaagacggaagaactgtgattgacaagacagcttaggatatgaaggaagaccctggaaaccctgtgtcaggaatacaaacagattagactctctctctctctctctctctctctctctctctctctctctgctgtgtgtgtgtgtgtgtgtgtgtgtgtgtgtgtgtgtgtgtgtgtgtgtgtgtgtgtatgatagtcctcataacacataaaaaaactatctctagaaaaggaattattttaccttaatttaagataaagggctttaaaggaatattaagagcccttgccaagttgacaggagtacaacccaaaagttttgattttgatgtcaaggtttgtatgccttctccctcagcctagcagaaaagcctagcctgtcatgattcatataatctaacgaatatttaatcataaattgtgataagaattggctcaatgtgtaaaatgcttattacacaagtgtgaggagaggagtttggatccccatcaggggatgtggctatggtggcctcctgtaatcccggggcttaggggttttaggaggtagagactggggatccttaagtccagctgagtatctaggtctctggtttcaagtaagagactctgcttcaatataaggtggaaaccattgaggaggatacctcatagcaacctctaggcacatgatgcacatgaacacacatgcaatcatacacacacacctgcacatcacatatacaaaaacaatcaaataatttaaaaaagaccaccatcaccgtgtagcatagaagtcagaggagtgagtcagaggagtgagctgtatttaatcggacatctaaaagataagcagacatcttatcagacaacctcttaccccacaaaataggccaatttctgcttttggggagcctgtaaagacagaaggaagatgctacttcccactataggaatcccctgtggggttgcagcagctaggacagtggaagcttcagttcaggaaatgccatgtcttaagccatgaagctgtggaggaagagtcacttagtaaagggcaggatgcacgcctcatgcaggacagctggaggaaccacaggcctactagttgttgcagaaagccagaactgggagagtggtccaccttatcagtcctgtttgtgtttgcttcagagccttcagagataaagttccccatttgtcctttgagatgcttcctcagagacttttctattgacagttcacattataactcacagaaaattacttaagattttctcttttcatggcccctgatcattgttaacattcaaatcctgtttattgctggagtgggagtttatctgatagtaaatattaggtattagcgttcaaacttttatggtgggatagatgtaatacactcaattgttgatttttactctagaacaagagtcatggtctaaggtgtgagtgatagcgaggtgagtagttagaccaaaaaaaaaaaattattgtaatggacactagtgagcagaaactaaacaaactacctacagccaagactccagatcagtcagattttatgtcagaatttacctatgcccccagattgctgagatttgcattttgtttgtttttaaaagagcaatcactgatgtagggtcctaaataatacatccagattttcttatggcatttaatttgttttcatattgtgcaatcctaacagattttagctatgagttggtgacctttcagcaaacatggattgagcatatattccatgcttctcgtgtgctatggaagataccaaagatgctaagcatacatggtctagacccttcccttaaggaatccacactccagcaatcaaaatgtgcagaatgataatcattgtaacccagtcaaaaaagaatataccacaagtatttaattataaattgtgataagtactataaaagcaaatatatgtaaaacaatcagagataagggaagaagtaactggtatttgtcttggcttcagaaaggtgagcgtgcatttatctaaaggatgaaatggagcacgaacactctaaacagaaggaactgtatctgcagagaccctgagtgagatagcattgagcatgtccagggtacagggaggaggcatgggggatggatacatagtaaacggtaagaatcacatattatgaggtcagagagaagttgggtccacccatcatatgtggcattatggtcaatgtaagggattttgtgaaataagcaaatccagatataacttctcaactcttgcattgtgtggcttccatgcttagaatcctacccagcgtatctgtatacagcacagcagcaaacaagccccgccaccggagttgaccaaacaaggtgccttgtttctcactcatacctggagaactcagatgtgtgctgatgccgtcaaaactcatgccacattttgagtgcatagattttatgaagatggttagggaggttggcagtgcttcaatattaacatttagggaactgtgtttgagtctttccattatgtgccataaaggagagacaagtgtgatcaggagagagatggaagattagaaaatacctgaatttaactggaaatgaaagaataccaggtgatgttaacaacacattagagggtgtgaggaaattattacagcatattaatgtattttaaaaaccatttacataaaaaaatactgaagatgagcagaacactcacgaactgcgatataatgtcatgttaacgtgtgttgttgggtctcaaaagtgatggggacagtaaaagaacttggagggaaaaatagctcaaaacttttcagatgtggtacagactacagacctatgggtgaaggaggtctgacatgattccaccctgcccccaggctattgccaaggctattggctattccacatatctgatggtaaggctgaagatggtaattggtgaagatacaacctatttatgttattgaacatggagaaattgagctggtccccacctaactatcagtcacccttactgactaactaccagaggagaaataattatcaattttatccagtcacaaattgcaacctacagcagagaatgatctgcctgcaacatatactggtacaatagcggtgcaaatgttatggtagtaaccaaccacttcctgattagaggtggcagaaacctgaggctagatggatcacggaccctggcgataactactattattctgctaaaggaacagtaaagtgattccccatgacattctcctataaccatagatcagtgccttgctcattcatcatcagagaagcttcttcttacagtagatgggaactaatgcagagactcaaactagatgatgtggagagagagagagagagagagagagagagagagagagagagaaagagagagagagagagagagagagagagagagagagagagagagagagagagagattgagagctagaaagaccaaacatttctcttttcaaaagtgtaatcacttcaggaaaaaatagttcccactggccctttgcccataatatgaaacacttcaggattgtttccctatactctgatggtctcaccttcatgtcaaagagaaaccgtggcatcaactgatgatagagaaaacttcacctaattgagtgaagagtgtctctggcaaagaggaagccagtccctctcgattgcttaggaccctgacctctccccttcctgctctgcttgctccatctctaccacgtctcaaccctccaaactccttttaatctaggttcttcttcaaaagcggaagactaatttctacatcacccctttgctgcaggagggaatgcctggtatacagaggttttcaatgggacttttcacagtgaagcaaggcatctttaccctgggacagactggcttcataggcccaaggagtagactacatgcaggagctggatgcagggagcatcagggtggagaagagccagaaaggcccagtggcaaggtgcaactaagacaaacaaacaaacaaaaccagggctaaagatgattgccctggaaaagaagacattatatttttttcagagccacacaaaacagcatgcaaacagcatacacatctcatgctaacagtaagctagcatgacttgtaaagaactctgaagagaacatactgattcttgtattatgaggtggtttattgatgaaatatgattgagtctctgattacatgcaaacagttgttctaataccctgaaaactaacttggtcagccctaactagtctttgctagtaacaattatccctcagtgcattatggagtgtaaatatggggacagaggttagcgtatatggcatgtgtgtgacccctctgagaataaaagttgctatgaaaggcaagtgatctgcagagagctagatctcttgctttccccgcactggagagtggttgaaaactctggatgtctttgtggctgtcatttctccaggggcttcttacgcagaccacacgttccctgccgagaggaaggatgatgccgtggctcctggagaagaatacacctatgaatggatcgtcagtgaggacagcgggcccacacctgatgacccaccatgcctcacccacatctactattcctatgaaaacctgacccaggatttcaactcgggtctgattgggcctctgcttatctgcaagaaaggtaaaaacaatacctgcagatccaacgacagcaaagatgctgggctggctgggagattatatcgggctgaagcttgggagaaccttgataccttcctgtaggtgaggcaggagaagggggtggagatcaaatcatggctaagagaaagcagcacttggtactggctcttcccacttcttctaaaacctcccttcattctgagtcatgacaacttccttcaagtctactctgacatcgtgcctgcatacttgtaggaccagtaatgtttacctcagagccaggtctatccattttgaagtgtacaacaccctagttactgagagagtttctggaaatgacatcgactggtccaactgacatagctgaagttcctgttggtggtgattaggtttataaacatgtataactctactttcttttttgctgttatttggttgaaggtgggttggttggttggttggttagttggttggctggctggttggctggttggttagttggttggccttttaatgtttttagtagaaagggccttgaactcagtgatatttctgccctagcttccctagtggcagatcccaggtgtgagtcatcatccccagatcagccgatttcttaaaaacaagttgaacaatttaggtgtagttgacagattttgtgagtgttgacttttgcccacctatgtagatctgtgtttgtgaggcttgggatttgaggcctttaaagaatggatggactatagtctaatgctctagacaatttcacttccgttttagtgtgctttgtgcatgaatgaagcaaagcaatgatccaagggaggatgtctgcgttcagaaaaacatgtaaataaatgctagtaagtaaccctaaatattgacagagcagctctttcccagagctttctcaggacagaccaacttaaacacaattgcctggcacatatgtagatagattatatctgggaaagcatgaaagcgaggcagaaggccatattcagatttggagtgcactgaccagattgggttctatagctatgttctgacatccagcaaggatagcatgttttataagttgaaggtaagtgtttgtcacaggaaacataaaatcacatctcagaacaatccagggaacaaagtgcacctgagctgaaaggtcctcatcagggcattgttcaccatggggcagcctttcgactgtgtcccgacagtcaggaatcccattagctgtgcttcttagaaatacacttgatttctcctttcttccttctcttactctaagagacttcaacccatctttcattaaaacatccacagaaccacaacagactgtaccctggagataatgtcatttataccgatacacagatcatagacccagctctcttattcatcatgcaaatatatttttaaatttcctgacatataaaagattctgtgattgcattgggaaaaacaatcttatacaaggcactttcatttgatcactgttttactcatataaatatggattcatcttgatacaaacttttctctagtcgcatgtcccatttaatgaggaagcttcattcaacacaagttatgtggtctggtctaggagactggaagaaatggggtttttcattgttgataatgttagattttgacttttcgaggtaaactcttagtagtccataatggatttgaactccctatgtagcccatctgtcctcaaactcatgatcctcctgtctcagctttcctgggtcctgggattataggaatgcatcctaacacttgactgggaatgtatgattcaaatttatatcaacattacttgtttctagcctcaacttcagatgtatgagaacatggaaagtactctttactcttccgtctggacctggatagaagcctatcttttctctctcaggcaccctgaccgaggatgggactcagaagatgtttgacaagcagcatgtgctcctatttgctgtgtttgatgaaagcaagagccggagccagtcaccatccctaatgtacacaattaatggctttgtgaataagacgatgccaggtaatacaggggccaggcaccattcagcaatgacagtgtcccgagtgtccaacgttggtcctgttctttctttaaggcagaagctaccgtgttcactggtttccagtgcctagtggtgaagaatcacaatcttctgcaatgattcggggattttcatgattttatcatcatttctgtcttacccaggaagtacaacagataaatcagaagttaacaaggaaccttacttgatacagccttgttaggtgtggtgttctgagcatatcaatgtctgctcaagtacagagtcactctataacagtatgctctaccattcaaaaatctattgatgaataatgtccagtggcatgtaggttttctcttcccatctgcagatagaattttgtaagaaagtaaaatcatacaagctgttaagtgtgtgtgtgtgtgtgtgtgtgtatgacttccactgtactagctaattttatgttgctataacaaaacactgagtgctggctactatataaagaaaaaaatgttttttaaaaaaattcagtgttagaagcagaaagacctagactggcagctcatcagctcagcctttgatgagggaccacttatctatgtcacagtagggcagaagaagcaaaaagggaaatggctacatgtagaagaggctaagaacagggatggggctgaggcttgctttataataacttgctctcatgagaattaaccaaggtcccatgagaactaactgtattaatcacttccaggaacagcacctccagtatcctaaccaccttcctctaggctctatgtttctaggttctaccacctgaaattcatcacacagagtcaagcttttgtatatgcacctttgaggagacatactgtaaccatagcaaccacttatctcacttctcttttctgtctttctagtagaactgacttacaatgaaaaatccaattctagtaaaaaaaaaaaaaaacaaacaaacaaacaaacaaaaaaaacagagaagaagtggtatagatggttgctatggttatggtacgtctcctaaaggaggaaagcctagatttactctttccttgttctcatggtgattgggaaactttatttctctgtgggagattctaatcttgacttctattccagattaacatttcaaatttcaaatttacaatcaccagatacaagacaatgggctaagaattggtctcttaatatgtatgtggtaactgtacacacagatacatcccataatatgtatgtatagatatatcccacaattatatatatagtatttatttatgtttagtgtaggaaaaatgaaaatatttcttgattaaaaaattctgggggctggtgagatggtgcagcaagcaaggatggttttctccaggtctgatcatctgagttggatctctaagaacctcatggtgcaaagagagaaccaaccttcacagatcgtcctctgacccacacacatgaatcatggcattcatgcccatgcccatacacaaaataaataaataactgtaaacaaaagcaaaaattctaaatttcgtcatgtatcaatatcaccaatggcttgtcttacagaaaaaccaacattgtcaagagtcagggtctgatattgctttcaatctttattttatttcatttggtgccatcttctgccagtctcatgcagctctgagtattgattctgagttccagaactaggctcctgcaaacctgagactgcactaactgacctccaaattggaagatctgaattcgcatctcattcctttccctgactctgtgtggtccttaccaactaggagtcttaatatgctgttcccagaaatggaatcaacaatcccactgtctgtgtcctgacagggagaataatccatgtaaatttataaaagctgaaatagtggactgaatgtgcaatatatacttgactgaatgtgcaatatatatatacttgattgggacagagatattataaatttgtacttgaaaaaaaaagagtagcctcaaataagtgcaaacccttagtagacacaatacttatgctgataaagccccgagccttctagaataacatacactaatagatgtgacaatactaccgtagatgtgttcattgctgggcagctcagtgtgggctgtttctgcgtgggataaacacacccgcaggaacacgtaccttctagttccctcccagcctcctgtttgcaaggctttcacaaaggacaaatgcctctatggataagaagctaaatcccagaccatcctcttatatctagtgattagaaatctgggtaggagccaggactggactctctcccagagcaaataagcattttttctcaatcactgtggcaacaaagaaagcaaaactgggctttctccttggttttcttcctccgttgttagcaatctgtcctcaaaaggctctcagtgtccgcttacaaagaggacaccagtaacaaccgagaaatcccttgttactaacataacttcagaaagggtaaagacagtaggaaatccttcagcacatcctcacactttcttctactttgacagagcttggtctctatttgcagaagaggattaggtcctggcacccaggcctattgaaggtactggggacttcttccaagtgaggccagatgggtgtgaacagttactccattttacccaggactttatcagtctatacactgggagccctgtgtcctgagagacctctaaatctagacaaactgggatagtgcatcacatgcttacctgcctcctagcctttgtcccttagctgtctctgcagctctgaaggaatggcccccattctaaactctacccctacacacacagtttgtgctgctacttggtatgtgagtggtgactccttgtttcccatctctctgtttggatgatgtctctccctctcagatctaacagtctgtgcccatgatcatgtcagctggatgtgtatggctgttgtctctccctctcagatataacagtctgtgcccatgaccacgtcagctggcatctgatcgggatgagctcggggccagaattgttttctattcacttcaacggccaagtcctagagcagaaccagcataaagtgtccaccgtcaccctggtcagcgcaacatctacgactgcaaacatgactatgagcccagaaggaagatggattgtttcttctctcatcccaaagcattatcaaggcaagaaacctttcttgttgtggttaaaattaattgggggtttctaccccaccttggatcatttagttcccaagttcccaggtaaaagacacaaaacctttatatttataataagccttaacatcactagagctggacagacatctaccccccatgccattttgtctacttccctctccgtgaccctgagatatgacctgccacgttctccctgggctgctcttcctgctcttactccaactggccagacctcacagccatgttctcataactcatctctcccattgtttcttctcctccctcttcatcttcctgctctcctcctcatgctctctgccccagactccaagtctgacaaccaaagccctgcctatctctcttctgcccagccacaggctgcagacatctttattcaaccaaatgttttacattaaggtgcaaggttacctagcaacccttggtgaggatctccttgtccctcgggcaaccagagctggtagttagcatcacaacacatagcaacagactaaacctcaacaggtcctgacagtgttgcgttgagtgagcaccattgcttctcaggctactaacttatttcttctcctttaccatttagttgaccccacctagacatgggcatcctggttcctaagacaccattagatgctttgctcttagactcaaaacccactaattggggatgaaggaggtgcaggcattgacaaggacgttttaagacaaagcaaaagcttaagaggtctctacttccataacggaggaggagaactaacacctctctgaatgtgttcttggatgtctttcatatgcagccaaaggaaaggaacctagaaactagacagatgaaagtaaatatccacaaatttatagaagtacagagctaccaagactgaccaggctaaacatgataatatagtcctgtgcaatgagatgggcacaagatccttgcacagaaaagaactcaatcaatgtgtgttgaatggatcacaaatgtttttattttctgttttattgagataggatcttctgctgtatgccaagctgtcctaaaactcaccataaattcttagctggctttgaaatcatggtaactctcctgtctcaacctctccaatgtggggatcataggcatgagccatcacaccagctagaaatggacttcagagagcatcagtgaattctggagcggggcggggcgggtgtgtgtgtgtgtgtgaagaacccagcagtagtcatgtggtaccatgtaaattaaacatctaactgtcatatcacacatttttttttcctttagactattgagaagaacattcatcttgctagagatgaaaatctaagcaaatctattaccgtagaaaaccatttatcacaaccaggtgtgtgagccctggagaaactaaatactgtatgagaacattgtgttttcacactgagcaatcaagactatgatgaaatgatgatccagacaaactatctcgagtagttactaatagaaataaagcaaaaacaaaactaaaactgcagacaattgctattatgcattattatttaataatcacactaaggatacactttgatagtctccatttaacaaagggacgaataacaaggaaagacaaaattaaaatgatgtcttgttttatatatatataaagagaaacagagacagagatgagagctgtgttaaggatcaaaccgaaggccacctacacactaagcccacacttcaccatttcaccagccctaggcctagggtttttagtttgttcctgctgcacacaaaacacagagaacctcatcaacctttccctctgaccctctcctctcctcctgcttctgactcttgcctccttctgtgacccattaaaagagtccagactagcatagccgaagactgtctgagcattgctgtctcctgttattatttgcctccagtgaattgatttttttaaatacacattttgatgaataattgtttctctcaagttctacctctgcctttatattctaatccagctgggatgcaggcttacattgacattaaaaactgcccaaagaaaacgaggagccccaagaccctcactcgggagcagaggcggtacatgaagagatgggagtatttcatagccgcagaggaggtcatttggaactatgcacccgtgatacctgcgaatatggacaagtgagttggggctcagaccgccaagtcaagatcaaaggcatggcccacagggtccttagtgtgtgggtctcaattatgatgtcatgagtggccagctcttaaggtaggtgtgcattggtttccacctaggcattcttatcctctgagacattcaattatccccaagtccccgtggggatgtggcctgatgatagcaacagggacaatggcagctagaacttgttgaatgcttgccactgctaacccttgtagtaggtgtttgctaagggtctcacatcagttctacgagcacagtgctgttcttgtgttcccgtgttggagggaaggtgccagagaagctctagtaactcttcatatgacattcctagtaagaaaaatgagagtgaacttttactggggtgctactctgtacctaacagactggcaggttcatatcccaccatctgctgttgaggcttcagaaagcaaaagctatcacacacattctggtggcccaatgtgctgctaaagccattccgtgggataacttggcaaaacgggttagaatggtaaacacatataccctttaccccaggcactgtgctcttggaattcaatggtataaaagtgttcttgttcacaggttagaagatgtatgaaaagggtgctcactgctgctgcgatgttaccagtgatacaagattaaaattaactccaaaagtccttcaattggaaaagagtaccaagttatagcatattcatacaatggaatactatggatccaataaaataggaaggaaggaagggagggtatagacgtgctctgtccctgtagctacttctcttcagttacgtatggcttatccagtggcagaggagatgactcctggttgctacatggaggacatcaggatgcaaactacactcagactgttcccagaagtagcattttagcaagcagcacttgcacgcacaagggtttccccgtcatccattgcactggactcgctgccgctggaagtagtctaacctttgtttcattatttcatttcccttaaagaatttacaggtctcagcacttggataatttctcaaaccaaattggaaaacattacaagaaagttatctacaggcaatatgaagaagagaccttcaccaaacgcactgacaaccccagcatcaaacaaagtgggattctgggccctgttatcagagcccaggtcagagacacactcaaggtaagcaacagaaatacggaagcaaggaaaaattaaacagggaaagacagatcaagggactggcagttttaatatatttaaatgtattcatctaattataaaatcaaacatagctctcagttttatttagcatttcattcttgtatatcctacttaatttaaaagatctgggatcgataaagtagaaaagaatagagagaataaagcagagtcagtatcattggaggagtaaggaatactatatgggaactaattccatctggtcacaaataagcataatgagacacacccatacatccccaaggttgtctgcaaagtgtgtcccaactcttatagcaaagtaaatatgaccgagcaaggtgcacacaccagtgaatgcagcagttcgcctggggtagagagccaggagaactttcttgccctgggttttcaagtcagtgtccttgacaaaagccccacaagtgtcgcagaacagaagtcctgagcggctttggaaaatgacattgcccgttaccagtgtgagcagttgactcagcacagcggagaagagataaatctccactccagtctcagtgtgtggcgctaatggctggtctccgatttatactcgcacaagaccctctggctggcaagatggctcagtgcatagaaccaattgatgtcaaacgtgaacacctgagttcatcacccagagtttatggtgggaagagagaatcaactcccacagattgtcttctgacctgacatatacatacacaacaacaatttaaacaatttctttaaagcctgaaactttcatcaaataattaccttgaacgttctaccatatcacagagctaggtagggacccagacaattgaaggttacactgattggcaggaccctaggatatagggtcttgatgttgactaatgattattcaaaggctttggcagcaaaccaagatgaaggtaaggttaaggttgtctcttgaagattgaaaggctaattagaacttctaggaagattatgccctaaacaaaacccattttgttcatttgaaaatggacagcgtcttccttccctgcgatccgcccctcatttttggctccactgggatgcattagatttcagtgtaagcatagtctatctgaaactcagggtctggctactgcggccattcaggaagttaacttcaagaacaatgatcctgggaaacaaaacggcattgtggtctagaggagagcaggcacagaggacagatgcatagatgcagtgcaatctgaaagaagaagggaagggtgtggggaccagctgggagagggtgaggggttaggaggaatccttcctgtcgggtaacgagggaggctgctgccgggataaacagaactgattttcccactgctgcactgcacatctgtgtgtgcacacctgtccatacatgcacacacaagcagctgccttcatctcgtctgaaatagttctcatgagtgaccttaaacacggaaataataactatgacttaactttctagatcgtgttcaaaaatatggcgagccgaccctacagcatttaccctcacggggtgaccttctctccttacgaagatggaatcaattcttcctccacctcaggtgggaacctttcacttcttggagactactgatctccgagaggcatccacagtgttctcttgtatttgtccagtggttatgacaaacgcagtcattaatacggaagggttatctctcctttctgagtgtcattggcgccatctagtggacagatattgaacagctacatgctatccatagtcaggagttttaatacaaaaagaatatttttcttcatattaattactctaaataaaagctaaggtagatatttattatgatgaaataatttttctaaaaattaagagcgtatattttcttccaggcagtcacaccacgatcagaccagttcaaccgggggaaaccttcacttacaaatggaacattctagagtttgatgaacccacggaaaacgatgcccagtgcctaacaaggccatactacagtgatgtggacgttacaagggacattgcctctgggctgatagggctgcttctaatttgtaagagcaggtccctggaccagagaggtgtacaggtattttatacataacataaccttaaaaaaaaaaaaaagaaagaggaatttcccctcgctggcacagattaggtctcactacgggataggaggatttcccttctaaaacacaccaatcattagtcttctttggcaacagtgtggggatatttacacacatctcgcatggtgtccccgtttctctgactcctttcctctggactctgactgcagaaagcacatcccactggattgtattttagactcaaacctgttgactgtgtgatgaagaaaccattgcagctcctttaatcctttcctctggtcaaataggcaacaatatccctcctagaaatgtgtttacagggtggcttaggagctcagtgagaacttggcgccaatctccgctcttttcagaggcaaacatcagaggcgggagagagcccccgggagcaaggacatttggagccatagttttagtgaagtttgagcctgccaaaagcccttctttggtgaaactaagttatgacaaacaatgtgatcaaagagatgggatttctgagttcacttttattttgagacatggcctcaaactcactcttgtagtccagaatagccttggactttttaaaaattgtcttttcttatccttccttttcttttctttttatagtttaggtttatgtgtgtgggtgtctcatgtgcatgtatatctgcatacagtgtgtatacctagtgcccacagaggacagagaaggtgttagctagattcccggtaactatggttacagatggttgtgagctggcacgtgggagatgggaattgaacccctggtgccctgggagatctgccaatgctcttaaccatttgagccatctttccagcccaccccctgttttatttatttttttgttgttggtgtttgcttgtttgtttttctttttgttttgagacaggtttctcttgtaattcaagcaggcctcaaattggttatttagtcaaggataaccttgaaccttggtgcctcctgagtcccaggattagagacgaatgctactgtacctggtttactggggtactggggatcaaacttggggctttatgcatgccaagcaaatactttagcaactaaagtatatcctcagcagcctgagtttattctcattgacaattcatagtctcatattattccccattaggctaattcctattaggctaagtaatattggaagaggtcttatccaaaggcatgcaaaataggcagatgtctagaaaaatcagaaaatttgcaagatcctgacttactgaagaagtaaacactacttggaaggctgggtgtggtggggctttcctgttgcagcatcctggccatccctttcgtccatttggaacacggtcagtcagccattctgaaaagttttccattactctgacctacaggtgttatactaagggaatttcccccctgggtatttttgactgaattctctgactccttctctttgtgttcacatattagctttatctctgacaagggtttggtaaatcatggcctcctaggtgccagacacgtggctcctctggaccccacgacaatggggacatcggcagcccaccagagcagtgatcactgccctttcccctgcagagggtggcagacatcgagcagcaggccgtgtttgctgtgtttgacgagaacaagagctggtacattgaggacaacatcaacaagttctgtgagaatcctgatgaggtgaagcgtgatgatcccaagttttacgaatcaaacatcatgagcagtaagtcagactcccgtgtccacactgggggtcgcagtgtgtctgtacccaaaggaaaaaaatgtgatgctgggcataatcctctctaatggcaccctctccctctcctctcctctcctctcctctcnnnnnnnnnnnnnnnnnnnnnnnnnnnnnnnnnnnnnnnnnnnnnnnnnnnnnnnnnnnnnnnnnnnnnnnnnnnnnnnnnnnnnnnnnnnnnnnnnnnnnnnnnnnnnnnnnnnnnnnnnnnnnnnnnnnnnnnnnnnnnnnnnnnnnnnnnnnnnnnnnnnnnnnnnnnnnnnnnnnnnnnnnnnnnnnnnnnnnnnnnnnnnnnnnnnnnnnnnnnnnnnnnnnnnnnnnnnnnnnnnnnnnnnnnnnnnnnnnnnnnnnnnnnnnnnnnnnnnnnnnnnnnnnnnnnnnnnnnnnnnnnnnnnnnnnnnnnnnnnnnnnnnnnnnnnnnnnnnnnnnnnnnnnnnnctcccctcccctcactcacagctctaggacttattgatgggcttgttgaatacccctgggctaggcatattgaaaccatgacactgcactccctggtccccataggcttgttcaaatacatgactctatggggaccatgtttagccatagcataataaaaagtacatttagtccaacttccaaagtcccatagtctctagcagtctcaacaatgttaaaagtccaaagttcaaagtctcttctgagagctatccaaacacttaactgtaatccccaaagcaagacaggaaaccggctgggcaaactccaaactctgcatctccatgtctgatgtcaaagcagtcttcagatcttcaacaccttttttcatctttgttgactgcaacaaacttctttttctgggatggttccactccctgttagcagcattcttcagcagatagcattatggctctggcatctcaaaaatcttggggtctccaaggtaacttcaacattacagcttcttgtttcaatgtctgggattcacacatgatcttctgggctcctccaaagggcctgggtcacttccccagctctgccttctatagcattctaaactcagatggatccactccactgcctctgctgttcttggtgatcatcccacagtactggcatcttcaatacactggggtcttccactgcaactaggcttcaccaatagcctctcataggatctcttcatggtgccaagtctcaaattctttggatgacctcttcagtcctgggctatcaactacaactgaggctgcaccttcaccaatggccctccgtggactctcatagcaccaagcttcaactgttcttcatgactccttcatgccttcaaaactagtaccacctgggtaactcttacacattacaaaatacaactgctgcaggaggtacaaccttggctacctcttgaacatagcttttttgtgctttcattaaacacttcccagaagatttcacctcagtgatgctgatctcttcttaattatcactaatttcttagctccagctaaccggcatcaattgtcccagtagttccttctattctggactctaaagccagagccacatttccaaagctgctgagttctgctgcttgctggggctggaacatgggtcccttgttctattacaatatcacaagctttctgttttccaactccttcactacctaagcttggctgtcctggaacttgcttcatagagtgactttgaactcagagatctgcttatctttgcttcctgggattaaaagattgtactaccatgcctggacccaaagttagctgggtaggatcttgccctacggtcacttaattattcctttaattcagtttaacaaccttgaacacaggattcagctccattttacttcctggtacccatttaatccgcaaactatatattttgtatttttcctttctcagcttgctatgtttgttcaaaatgttcttcatgagacttaaacagagaacaaagtctatgatgggcatgtctgagacttcctttgccaatgcaattaacacgagtctcttcactttagcctcaggcagacacttcagataagggcaaagaagtagtcacattcttcaccaaaattccacaagaatggtctctagtccacatattgaaattttccactgaaactcttgggccaggtccacacaattcaaatcactctcagtagcaaagtcttccatattcctactaggatagcctgttaagccccatttaaagcattccactgctttccaaatccaaagtccccaaatccacattcttccaaacgaaagcatggtccggcctatcacagcaatactccagtccctggaaacaacttctatcttaattagggttttactgctgtgaacagacaccatgaccaaggcaagtcttataaaggatgacatctaattggggctggcttacaggtttagagattcagtgcatcatcattaaggctggagcatggcagcgtccagtcaggcatggtgcaggcagaactgagagttctacatcttcatctgaaggctgctagtagaatactgacttccaggcagctagggtgagggtcttaaagcccacacccacagtgacacacctactccaacaaggccacacctccaaatagcgccactccctgggccaaacatattcaaaccatgacacgtgtttgcagaagaatatgtatttatttgatccttaaagctcatgtctgtggagtccacctacatcttagtagccacttgtagccagtccatcacattaggccattaagcatagcatctggaatgatgtagaaactagtagcacacaccttcagcaactctacatgaatttggtacatagtcacttaaaatcttttttattttagtaccaagcatcatactaggactggtcacaatgatgacctgtgtgtatagattgtgccctcaaatgaattgtatcttaatgggatcatcaccctcagcacatatgcaaattaaaatgttacctaaattggtcttcctttaatagaaattaaaatatatgaactcaatactggagtggaaactgttaggtcaactgtaggttatctaacagatagtaggtctcaatgacaaatgtgctaagtgagcttctttgtgtgacattcattttactcatatctactatgccaagaagatagagttattatacctagacttgtccttccagtagatgcatcttgaacaatttaaatcaatttatatctgcttggtgaatgattaactaaatcaacatccacgaaaggcttgtcttcatcctgtctttttccactcagccatccctgacaaagctgaatgtggcctatgacctgctcacacattgttagacgttataaagcttatctttaataatcaccattttgatgccaccaaatgaacacagggacctggagatcattagatgtgggtcctcttgttgtacaggcctggcatttgacaactattcctccttcagctatcaacggctacgtgcccgagagcatttccactctgggattctgttttgatgacactgtccagtggcacttctgcagtgtgggaactcatgatgatattttgaccatccacttcactgggcactcgttcatctatgggaggaggcacgaggacaccttgaccctgttccccatgcgtggtgaatctgtgacagttacaatggataatgttggtgagtaagagtgtagatactgggagagctcactcatgggatctcaggtggaaaaggtctgttgagctctctaaatcaccaccactcctggtgtgtctcccggacccctgcaggcttgccttacactgcttcttgttgtttatggttgggagattagcttgcacatccctggaacaactgggcagtaaagacataccatggcagaaaagataaatgtaactatgagaagcagcataaagatattagccatgaaaacaacctttgatgtcatttctcaggtcttgtccaccttttgatgaagcactagcatagaatttgccaactagggtatagtgtctactaatcccaaggtcacacctatgtacacttccctggagctgtttgtttagatgtatttattttatgtatatgagtatactgcagctgacttcagacaccacagaagagggcatcagattccattacagatggttgtgagtcaccaggtggttgctgggaattgaactcaggacctctgtaagaacagacaatgatcttaaccaccaagccatctctccagtgcgccgccctacacacacacacacacacacacacacacacacacacacacacacacacacacgggagctgtctttacaaacatgggctaccatgcctagcttttaaaaacaaaacaaaatgacatggattctagggatcaaacttaggtccttgtggcagctgaaccatctccccagacccactttttaattcttagcagagaccatcccaccctctggtgaataatcattagataagcctcagaggctgtctcagagaccacattggcttataagacccaagttcaaaccactctctgccactcagtgtttttgcaactttagacaggttactcgccctcactaagccttaagtcactcatttgaaaagcaggccagtgctttacagagttgcatcagctcctagctgtaagatatgccaagtgcttagcactcaacacgcagttcccactgcagatgtcccagatcatccttagtgtgtcagtaattcactttcaatgtgactcaaactcactctgtccccctgtatgtcatttcctagaaatacttaaatatcccttttgtgtgaaaaggcaatcttatcaccatctcccaaactctgagtcttaggcaaattgtataactaagaagatagtcatgattttcaagatctattttatcatcaacccctgtccctttttattgatattttctaaaacagtgactcttgaacaatccaaactgaaggtctatttttctccttcatctccacagatcataaataccctagcctatatgtcactgatcttgtgaccttgtgaccttgtgatgccaaaacaatatcaagttacactttaaaaatttttctaaataccttattcctgtttttttcttttatgtcaccaaggctcaggaatttactactcatagaccagcctggtccatagctcacgtgtggctacctctggttaaaattcactaaaaaaatttttctccaacagatcctcctgtttttgtaacttttcctgagctttcagccttctcttctctgtctcttatgaaggaacttggatgttgaccaccatgaattccaatccaaaacgcagaaacctaagactgagattcagagatgttaagtgtaatcgggattatgacaatgaggactcatatgagatttatgaacctcctgcacctacatccatgacaactcggagaattcatgattccttagaaaatgaatttggcatagacaacgaagatgatgattaccagtacttactggcgtcatcattaggaattaggtcattcaaaaactcatcattgaatccagaggaaaatgagttcaatctcactgctctcgctctggagaacagctctgagttcatatctccaagcacagacagagttgttgactcaaactcttcacgaatccttagtaaaatcatcaataataacctcaaagactttcaaagaacacttcctggctcaggagccaccgtggctggtaccctccttagaaacctcattggcttagatgagaacttcgtcctcaactcttctacagaacatcgttccagctcatatcatgaaaatgatatggaaaatccacagtcaaacatcacaatggtatacctacttcctcttggtccaaaaggatctgggaatcgagaacaagataaacctaaaaccatcaagacaggaagaccccacatgatgaagcacaggttctcctggatgaaagcgccagctggtaaaactgggaggcattcaaacccaaagaattcgtattctggaatgaagtctgaggaggacattcctagcgagttgatacccttaaagcaaaagatcacttccaaatttctgaatagacgatggcgtgtggcttctgaaaagggtagttatgaaataatagcagcaaatggtgaagacacagatgtggataagctgaccaacagtcctcaaaatcagaatatcacagtacctcggggagagagcacctctcacacaaacacaacaagaaagccaagtgacctcccaacattttctggagttggacataaatctccacatgtaagacaggaggaagaaaacagtggttttcagaaaagacagttattcatcaggacacggaagaagaagaaaaataagaagcttgcactacacagtcctctatctccaaggggctttgaccctttgagaggacataaccattccccatttccagacaggagactacttaatcactcactgttactccacaagtccaatgaaacagctctttctccagacctgaaccagacctctccttcaatgagtacggacaggtcacttcctgactataatcagtactcgaaaaatgacactgagcagatgagctcttctttagatctttatcagtcagtgcccgcagaggaacactctccaacatttcctgcccaagatcctgatcaaacacactctaccacagatcctagctacagatcctctccgccagagctcagccaggggcttgattatgacctaagtcatgacttttaccctgatgacattggtctaacatctttctttccagaccaaagtcaaaagtcatctttctcttcagatgatgaccaagcaatcccttcctcagacttaagcctctttaccatctctccagaattggatcagacaattatttacccagacctggatcagttgctcctttctccagaagacaatcagaagacctcctccccagacctgggccaggtgcccctttctccagatgacaaccagaagacctcctccccagacctgggtcaggtgtccctttctccagatgataaccagaagacctcctccccagacctgggtcaggtgcccctttctctagatgacaaccagaagacgacctccccagacctgggtcaggtgcccctttctccagatgacaaccagatgatcacctccccagacctgggtcaggtgcccctttcttctgataaccagaagacctcttccccagatctgggtcaggtgcctctttttcctgaagacaaccagaattacttcctagacctgagtcaggtacctctctcctcagaccaaaaccaggagacctcctccacagacctactgactctctctcctgattttggtcagacagtcctttccccagacttggatcagctgccactcccttcagacaatagtcaggtgaccgtttccccagacctcagcctcttgaccctctcaccagattttaatgagataatcctagccccagaccttggtcaagtgaccctctctccagacctcatccagacaaaccctgctcttaatcatggacacaaagcatcctctgcagaccctgatcaagcatcctaccctccagattctggtcaggcttcatcgcttccagaactgaatcggactcttcctcatccagatctcaactcacatacccaccttccttcaccatctcccacactcaataacacttctttgtcaaggaaatttaaccctcttgttgtagtaggtctcagtagagtagatggagacgacgttgagattgttccaagtgaggagccagagagaatagatgaagattatgccgaggatgactttgtaacctataatgacccctacagaacagacactaggacagatgtcaattcctccagaaatcctgacactatcgcagcatggtacctccgaggccacggtggacacaaaaaattctactatattgcagctgaagaaataacctggaattacgcagagtttgcacaaaggtttggctagttttcttttacactctcattctgtgtcaccactgttatgaaaatcacctacaatatttcttctgggatgatggtgaacaaattatactttatatagtctgaccctccagtgatatttcctttgccatttccaatattagcttctatgctttagataacacccaggcaaaacaagaccattactgtggaagtctgtggtatcccatctgtccatttatgttttgtacctgtatcttgagagtcctatcatgaaaatccttgctcagagcagtgtctaaaatcttggggataattatgctttagcaaaatcaaaactcagaatagccactcttaaggtacaaggccacttatccgtcaaattattatacatactgtagaaatactataggactgttaaaggaaattactgggtggactatagtaatactatgtatgtttaataaatgagacttgacatagcccaaaagatcctagaaatcttacctaagaaaatatatttgagcagaaaattaaaacacatgtagtcacctgtgtttccatttacatatatttagctaattggtgaaatggttactaaatattctctgctaccaagcagattacttcttaagttcttttcaatttctttgtttttattttatatgaatgtatgagtatctgcatgtatgtatgtgaaccatgtgtgtgcctggcaccacagatgccagaatatccattatattatattatattatattatattatattatatattaataactagaactggagttacaagtggtttaatgtcccaaagtgggtgctgggaaccaaacctgggtaccctgaatgactgaactatcccttgtaaatttttccaacacttttaaatttcttcttttaaatgaatgctattgctgttgttttagtgaaatggaccatgaagacacaggccacactccaaaggacaccacatacaagaaagtcgttttcagaaaataccttgatagcacgtttacaagtcgtgatcctcgggcagaatatgaggagcaccttggcattctcggtcctgtgatccgggctgaagtggatgatgtgatccaagtaagtcaccatccgggccccctagatctccaggggacatgccacaagcaccaaacattgctaaggtggaggcaacaaaactataggtgattggcttcagaattaacatataattgtgctctttccccaccaagactgcttggctatttgacaatttttgagctacagaaaagcttttatactttttttttttaacagtgaacatgatttaatctggaagaaatagcactgaaatttctagctgaagccagcctgttttgagctaacatggaaaatgagtcaacagtatcccatggctgaggtggggacagcaatagcattgatttataaaaatgtccccattctttcttaagagagaagatagtgaaatgaaaggaaactagaaatcagagtaaaaatgtccctttgccctaaatgagccggtttcttaagtatcttaccagacttagtcattgattgctttcaaaatcctgtatccagttcccagacaatagcttatttttattgttctgggatatctgcacaaccagaattcaaattggaagtctttatcaagcaggccagcgactgcctggagagaaatactttcacagagcagccccacagaatgcatattatagggagtttttaaagacaaagagcatagaaaaactacatcctggttggcagttgcaggaggaagcaagcaagcagtaaaacagaagccaagaatatgcagttagctgaggccgtttgaccatgagcttctagaacaatgttgggtgttttcccacagtacttttcaaggcagaggttagaaaccaaagatgccttcagctaagacaagatggaaaattttttagcctgttacatcataaaagagtttatttcccccatcctacctcacctctcacacaccaaacaataaacaaaataataacaataaacaaaacaaaacacatgagaacatgctgtggatccaaagcaaaccattctgtgtccaaaaacataaccttttactagtgtgtttgccaaattgtcagtgtccatttgctctttttcaaagagcacacagagggtggggagatggctcagcaggtagagtaaccacttagtatgtgatatgtaagaccctgtccttgaactccaacacatcaagaccaaccaatcataaaagacaatggaaatctgttttagtcatcttttctgttgctgtggtaaaannnnnnnnnnnnnnnnnnnnttgcaggaggaagcaagcaagcagtaaaacagaagccaagaatatgcagttagctgaggccgtttgaccatgagcttctagaacaatgttgggtgttttcccacagtacttttcaaggcagaggttagaaaccaaagatgccttcagctaagacaagatggaaaattttttagcctgttacatcataaaagagtttatttcccccatcctacctcacctctcacacaccaaacaataaacaaaataataacaataaacaaaacaaaacacatgagaacatgctgtggatccaaagcaaaccattctgtgtccaaaaacataaccttttactagtgtgtttgccaaattgtcagtgtccatttgctctttttcaaagagcacacagagggtggggagatggctcagcaggtagagtaaccacttagtatgtgatatgtaagaccctgtccttgaactccaacacatcaagaccaaccaatcataaaagacaatggaaatctgttttagtcatctttctgttgctgtggtaaaacatctgagataagaatccaaggaggagggctggtgagatggctcagtgggtaagagcacccgactgctcttccaaaggtccgaagttcaaatcccagcaaccacatggtggctcacaaccacccgtaatgagacctgacgccctcttctggtgcgtctgaagacagctacagtgtacttacatataataaataaataaataaataaataaataaataaataaataaataaataaatctttaaaaaaaaaaaaaaaaaaaaagaatccaaggaggaggaaaaacatttagcccatgatttcatccttggctgcttgactcctttgctttgggtcctccatagaggctggacaagatggttgcttcctttaaggtggctagaacttaaagagaaagaaagggaggtgccagtgtcctgagatcgcttcaaggcatgctccaagtactctatcttccttctcttaagcactttgctcacatccaaaggttttacctcccaaagtgtcacaggctggcaactaagccatcatcaacacatggtttgggggggaggggcacaaaacaacagtaagatataagtctcttaatgactctatacattccctgaagacataggaagttttgctgagtgattggtcactagaagtaacagaggaaagcagccagaagattccctccatgagtctgatgatgactctatgcctagtctcaactgtcaccaggggtcttaatccatctctgcatttcccaacctagccacacgcaggctttcccttgcagacatctttctgctcttctgggaacctgaaannnnnnnnnnnnnnnnnnnntactttcacagagcagccccacagaatgcatattatagggagtttttaaagacaaagagcatagaaaaactacatcctggttggcagttgcaggaggaagcaagcaagcagtaaaacagaagccaagaatatgcagttagctgaggccgtttgaccatgagcttcaagaacaatgttgggtgttttcccacaggacttttcaaggcagaggttagaaaccaaagatgccttcagctaagacaagatggaaaattttttagcctgttacatcataaaagagtttatttcccccatcctacctcacctctcacacaccaaacaataaacaaaataataacaataaacagaacaaaacacatgagaacatgctgtggattcaaagcaaaccattctgtgtccaaaaacgtaaccttttactagtgtgtttgccaaattgtcagtgtccatttgctctttttcaaagagcacacagagggtggggagatggctcagcaggtagagtaaccacttagcatgtgatatgtaagaccctgtccttgaactccaacacatcaagaccaaccaatcataaaagacaatggaaatctgttttagtcatctttctgttgctgtggtagaacatctgagataagaatccaaggaggaggaaaaacatttagcccatgatttcatccttggctgcttgactcctccatagaggctggacaagatggttgcttcctttaaggtggctagaacttaaagagaaagaaagggaggtgccagtgtcctgagatcgcttcaaggcatgctccaagtactctatcttccttctattaagcactttgctcacatccaaaggttttacctcccaaagtgtcacaggctggcaattaagccatcatcaacacatggtttgggggggaggggcacaaaacaacagtaagatataagtctcttaatgactctatacattccctgaagacataggaagttttgctgagtgattggtcactagaagtaacagaggaaagcagccagaagattccctccatgagtctgatgatgactctatgcctagtctcaactgtcaccaggggtcttaatccatctctgcatttcccaacctagccacacgcaggctttcccttgcagacatctttctgctcttctgggaacctgaaatgaccctcttctgatttgtccattctacaaaggccaatcccatttttcctgagaacctttccatgggttcttccaaattctcctaaacactcagctggcagctgtgtttccaaggcagaccctcccaaacccactcacactctgtgcatagctcctcttatatccagagtcgtgctttgggttcactcatgtctgtctctcttcaccagaaatctaaaagcttatgacaatcaagaactgtaccttatttgggttcaaatctcacttgtgggcatgttagatctttgttgctgtaacaaaatatacaggaggaactatttaaaaggaatggtttcttttggcttgtgggtttagtgctttcggtttatagttacctgtcctccatctctgtggggttgtgtcgaggcagagtatcatggcagggagcatgaggtgaggcatagctgcttttcttgtggagtcctggaagcagacaataaaaagggaccaagcagatgatatgcacatcaaggatgtgccccagagagcctctttcttcatctaggtctaaccccctggttttcaccaccttccaatgtgatcagattatgaatctgccatcctatttatctgttggccagaactcttatggtataatcaccatcctgaagtcccccggccaaacaagctcccaacacatgagtctggaatggacacttcaaaccattagagaagtaacttagagtagcttagcttgagcctaagaacacattttgtgtttctagggtgagttgctcaggtcctaattcatatgatcattgataaaaatagatcaagtaatatgcataaattaatttgcaattataggcacccagtataccctagctctgatatcataactgcctatcacagcctgtagcattgtgggttttggtttgctgtttcttggtatgttaatacatttgtaggtcactgttttgttttgttttttcctctaggttcgatttaaaaatttggcatccagaccgtattctcttcatgctcacggactttcctatgaaaaatcctcagaggggaagacttatgaagatgaatctcctgaatggtttcaggaagatgatgctgtccagcccaatagcagttacacctatgtatggcatgccaccaagcgctcagggccagagaaccctggttctgcctgccgggcttgggcctactattctgcagtgaatgtggtaggtttcaagttctaatgtctccctcattaaagaaccatagttaaccatttcttgttaaaagtctctcctgggagctgggcagtggggacacaggcctttagtctcagcacttgagaggcaggggcaggtggatctgagtttgaggtcagccaggtctacagagtgagttccaggacagccggggcttcacaaagaaagcctgtcttaaaatctaacataccctgagacccccaccaccaccaccacacaccaaaaaagtctctcctgttttttatggggcacaagaaagggctgccatccccagtatagctgccaacaccagggattctccatgcagttcatcagaaagggcgcagagaaaagtgttcatccaacggacatgatgaggattacataaatgatgagtgctcacagagaaatgtgatcattaacaattttaaagtagtttagtcttaagacaggctttgggggactgcagagggtcgggagagggccaggcaaggactgagccaactgtgtgggcacatatcacatgctgggtttgggagtttaaggagcaaagtttttccctgctcccattaagcagaaggagattcaatttgttacttcatgagtagcctttgctaataaaggattttttttttgtattttgataataagtcaaccctgttctgagttaaataaggacacagggaggaggccacggtgtccccagaggaataatccaggcacattccaccccccaagcagcccccacaggaaggtgggagtaacttgtttctctagacaaactgtgttgatcatggccagctgtgccaatccccctgccctcttggctggccttcagcgcctaggaaagccagagagaagccagcatccatgcagtgcctgatatacgctcagctgccttctttccccttgaccatgagacacagaggcctttgcacagtgagacaccaaacaagaggtggctgaggactctccccaggttcacggccaacaaaacacagagccctctacctgggaaagggcagccaaggttcagattggccctcaaacacggatttctttgtaagacaaggtatctgggcttccactttgcccctggatgagtggttatggctgatttttaccagggtcaggataccagaggtcaggataccagaggtctatactttttggaagcaggtgaaggggtcaaagccatcacaggcctagtgacgacccccacctcatgtgaaaggctgctcaactaacaaggaaacagagcccatgtcaagggcagaggagttcccaagagccttctgaactcagtgccacaagaaataccatgcttgtctctgactatgtggggccccactgaacatggggctcctggggaaaggcaccaggcatggaatccagggccagacacagcacagcacagcacaggctgagttagcctcaggcaagggtgaggggaacaagtcctggccacccacccactgtgcctctctgtcatagaggatgcaatttcccacttactgtaacacacacacacatacacacacagagggacagagacagagacagagacagagacagagacagagacaaagacagagagagccccactccgggtgtagacaaatgccttgacattctttttgaacagtcctgataagcttttataacctggtcactgacaatttaaggatcttcacttatctttccacagcatacacaaggttcaaaaccacatgcttcatgtagtaaatgcacatgtgtttcagtgaagagaaagagagattcatttttcccgtagtaaaaagcgcgctgactcggtttcctatttatttgttgatgttgttgttgtttcgtgtgttttttcaatgctgagcatcaaacccaaggtctcctatatgctcaaatatttgccactgagcaacacccaccccgacgtgtctgtgtgggtgctcttctaggcgtagatgtaaatactcattctatcactacaggggcactaggagaacaatttacccttataaccacaggttctaaagttaaaataagatagagggtgtgcatggtggccacaatctgtgattccggctacttgggaggctatgaaactggctcagagtgtactcaagggcgatgtgagcaatttagtgagatcctatcctgaaaaatttacaagaggctgggaatgaaaatcagttcagttcccagttccaaaatagagagaaagagaaagagaaagaaggagggagagggaagggggagaaattagtaaatacatgtttaatgaatgcatttacatttgtcatttaggatagttgtcaggattaaataaataagctactacaaacaaagcctttaacacagtatcattactcaataaatggtatccatttggttgacaatgttattgttgctcagataaaggataactacccagttttagtctttactgatcttcaagatgggagcctctaaaatgagatttttctgttaagcgagagctgtgattgtcagaagagaaaagacgatccaggtgaaaggcaagtgtttgcaatttgctcttcttttcctccaggagagggacatccactcaggcttgatcggcccccttctgatctgccggaaaggaacacttcacatggagcgcaacctgcctatggacatgagagagtttgtcttactcttcatggtctttgatgagaagaagagctggtactatgaaaagtccaaggggtcacggagaattgaatccccagaagagaaaaatgcccacaagttttacggtattttttcctttgtctttccatctactctctggtaaaagcgcaccaggtcacagcggttcctgcacttaggtcttcacaagattagaccttaggtgttcctgaggagtcaggagcatcaattaagcctggttcctaaagtcagcatcctaaagtcaggatttggctggtaggaaaccctgctaaagatgattgagagagtgcaggatagcacgcatgggctactgccagacaaaccaacaagaaagtgggccctgtgccccagatagcagcattcattggagtgagcatggcatcactctttatgacactaatgaccttgtttctttttctctaaaaatgtgagtaatcactctaagacatgatcacatgtgtgtctcttctgaaatcagagtggctcttggaggcccatctcttcgcagttgcaggcagcacctatgccaggtggcctgagaatttaaggaactaggaagttgagtagccatataacgggacactggcaagacagccagtccttaggaggtcacactaggaaaagtatcgcttcagaagtcctttgatctgccccattctgatctgcctgtggcctgtaaattggcaggttaattacaaaacagttttagaaaaaggctgaatgaagggcttagtgtacagtcaaaacagcaacagctagaaatcagaagaaaataaagacaggtatatgctaggacggctcagcaaagaagaacacttgcttccaaactcaaggaccacccccccaaacccaaggaccacgcccccaaacccaaggaccacgccccccaaacccaaggaccactatcccaaacttgcatgatgggaggaaaggacagattcccaaaaggtggcctcttatctacacatacaaatcacagccatttgggcacatgcacacacatacacacacacatgcatgcacccatgcacacgcacacataaatttaaaagcaagtgaaaaaggcctattttcacagtttgaaaatggagatagttggcctgaaacttctgattactgaggtcttgtgctttaggtaatgagtctgttagaatattgggggagaaaaagcttgcaagtgcctaaaatcccaacactctggaggctgaggtgggagggttgaaagttggagactagcctgagcaactcggtgagatctgtctcaaagaataaataaatacataaacaaacaaatacaggtcaagatatttttataacaagcattagatgccacctctggccaaccattgatgctaggtagccctgtatcggtgacacacttaagacacacttcttctgtatttgacgctacttccgggagaatttcaataatgtcacctgtaaaaatactttgagatacaagcaggcaaacaatgatttgttgtaaaaatcccacccatgaaggatgaagtctacttttcaggaaaacatttaaagattttaannnnnnnnnnnnnnnnnnnnnnnnnnnnnnnnnnnnnnnnnnnnnnnnnnnnnnnnnnnnnnnnnnnnnnnnnnnnnnnnnnnnnnnnnnnnnnnnnnnnnnnnnnnnnnnnnnnnnnnnnnnnnnnnnnnnnnnnnnnnnnnnnnnnnnnnnnnnnnnnnnnnnnnnnnnnnnnnnnnnnnnnnnnnnnnnnnnnnnnnnnnnnnnnnnnnnnnnnnnnnnnnnnnnnnnnnnnnnnnnnnnnnnnnnnnnnnnnnnnnnnnnnnnnnnnnnnnnnnnnnnnnnnnnnnnnnnnnnnnnnnnnnnnnnnnnnnnnnnnnnnnnnnnnnnnnnnnnnnnnnnnnnnnnnnnnnnnnnnnnnnnnnnnnnnnnnnnnnnnnnnnnnnnnnnnnnnnnnnnnnnnnnnnnnnnnnnnnnnnnnnnnnnnnnnnnnnnnnnnnnnnnnnnnnnnnnnnnnnnnnnnnnnnnnnnnnnnnnnnnnnnnnnnnnnnnnnnnnnnnnnnnnnnnnnnnnnnnnnnnnnnnnnnnnnnnnnnnnnnnnnnnnnnnnnnnnnnnnnnnnnnnnnnnnnnnnnnnnnnnnnnnnnnnnnnnnnnnnnnnnnnnnnnnnnnnnnnnnnnnnnnnnnnnnnnnnnnnnnnnnnnnnnnnnnnnnnnnnnnnnnnnnnnnnnnnnnnnnnnnnnnnnnnnnnnnnnnnnnnnnnnnnnnnnnnnnnnnnnnnnnnnnnnnnnnnnnnnnnnnnnnnnnnnnnnnnnnnnnnnnnnnnnnnnnnnnnnnnnnnnnnnnnnnnnnnnnnnnnnnnnnnnnnnnnnnnnnnnnnnnnnnnnnnnnnnnnnnnnnnnnnnnnnnnnnnnnnnnnnnnnnnnnnnnnnnnnnnnnnnnnnnnnnnnnnnnnnnnnnnnnnnnnnnnnnnnnnnnnnnnnnnnnnnnnnnnnnnnnnnnnnnnnnnnnnnnnnnnnnnnnnnnnnnnnnnnnnnnnnnnnnnnnnnnnnnnnnnnnnnnnnnnnnnnnnnnnnnnnnnnnnnnnnnnnnnnnnnnnnnnnnnnnnnnnnnnnnnnnnnnnnnnnnnnnnnnnnnnnnnnnnnnnnnnnnnnnnnnnnnnnnnnnnnnnnnnnnnnnnnnnnnnnnnnnnnnnnnnnnnnnnnnnnnnnnnnnnnnnnnnnnnnnnnnnnnnnnnnnnnnnnnnnnnnnnnnnnnnnnnnnnnnnnnnnnnnnnnnnnnnnnnnnnnnnnnnnnnnnnnnnnnnnnnnnnnnnnnnnnnnnnnnnnnnnnnnnnnnnnnnnnnnnnnnnnnnnnnnnnnnnnnnnnnnnnnnnnnnnnnnnnnnnnnnnnnnnnnnnnnnnnnnnnnnnnnnnnnnnnnnnnnnnnnnnnnnnnnnnnnnnnnnnnnnnnnnnnnnnnnnnnnnnnnnnnnnnnnnnnnnnnnnnnnnnnnnnnnnnnnnnnnnnnnnnnnnnnnnnnnnnnnnnnnnnnnnnnnnnnnnnnnnnnnnnnnnnnnnnnnnnnnnnnnnnnnnnnnnnnnnnnnnnnnnnnnnnnnnnnnnnnnnnnnnnnnnnnnnnnnnnnnnnnnnnnnnnnnnnnnnnnnnnnnnnnnnnnnnnnnnnnnnnnnnnnnnnnnnnnnnnnnnnnnnnnnnnnnnnnnnnnnnnnnnnnnnnnnnnnnnnnnnnnnnnnnnnnnnnnnnnnnnnnnnnnnnnnnnnnnnnnnnnnnnnnnnnnnnnnnnnnnnnnnnnnnnnnnnnnnnnnnnnnnnnnnnnnnnnnnnnnnnacaccacacacagacatataccacacacacaccgcatgcacacagacatacactacacataaacatactacatactcacagcacacatacacacacacaaaggcaaacagtggtagtatggtcaaggagaaatcaagaaggccttgagctcaagttcaccttgggctaaaaagtgagttccaggcaaaacaaaacaaaacaaaacaaaacaaaacacaatccacctatttcactaaaggaatgtagatacaacaatgcactacctgagacttagactctaacctgagaggtaggtagaggagccgtctctacaaggagagtgtgacacactgaacctgtcatttactctcaccctagggctttgtattatccaccctttctcattcttctgcagcaaaagaacatttatactatcatgtgaagggcaaatgggcaaagccttaagcaggagagggacaaaatctaggggaaaagacaaaggctgttttgaaatggagctgaatcatacttttgcaggtgttggaagttctaattcagcctcttattggttctatggaactgccaagaactctttctataactgcgtaggcctagaaatgcctggcaatgaggaagatgggtggtgatgggggaagcctacctgactcctccttgtgagacaagttcttaaatgattacaactttctttcctttcagcaattaatgggatgatctacaacctgcccggcctgagaatgtacgagcaagagtgggtgaggctacacctgctgaacatgggcggctcccgagatattcacgtggttcacttccatggccagaccctgctggataataggaccaaacagcaccagttaggcgtctggccccttctgcctggtaaagatctgagtgatggaagaggtccctgctaaggaatagatggggcacctgtaagcgagatagggcgccatctctctttctctccttgtacatctaccatttaaggaatcagaagagaagatctagatcctgaggcaaagctctgtttccatgctgtatacagaacacaaaacagatctcctatgagctgtgtgtaggcacctcgcaggacagatttgtgagcccacttggttctacagagattctgtgtcccatgcagtttctcctgtgtctttagaattagatttaagtacatgacaagataagtcaccaaggcacaggaaaaaagaaacagttgctattgggaggttgattagaaacttaaattgagctcttctggattcttgtaatccacttctgaaaccttcaccctgactttctgaggaagtgactctgagaatcataagcttgaacagatccatgactctggagggaaggtaccttttaatgactctaagagctgatggggtacttagagctttgcatgtgaaagtaggagggttagtttagtgtagatctaaacaaacagcagtcatcagtgagggttttgttgttgtgtccctaagttgtttccagggagacctgttagtgaaaggggttatgagggcaagatgccactgaagacctaagacactagctaggatgcacatctactgcgactttactctcagaggctttggataggcataggtcttggagaggagagccaggattctgcatctcttccaaggtctgaggatctagtgaaaggccatctctttgcaggagttagggtgaggaagtcaatgtgtgaattggtctcatatatggacatggagatagtcattgtgtgaattggcctcatatttgaatttggaggaagtcactgtgtgaattgatctcatatgtggacataaaggaagtcactgtgtaaattggtctcatatgttgacaaggaggaagtcattgtgtgagttgatcttgtatgtgaaaatggaagtccagatgggtccattttactaagaagacagaaaaatggcttcttgtttggttcttccatgccactttctaagaaatatagaaagtgatgttctgtttaacttcagacacaggatggaccaccaaattcagcccatattttcacaagagaagaagatgagaaatcttgctcactgtgtttgagatgaatagtcatccactgttaagttttaccttcagtcagggacctggtcctaaattatatcaatggaatttaagcataggatcaattggcagagtagacatcaagtgtcagtatgaataagcagaggttttagaaacattttcattttttctgaaataatttatatacatttttacccatgtatgtacacttttaagagtatttgaaaccataaggaaaggatatttttattccttacatattaacatagaagaagagagaaagaaaacatatttaatagccataaagttgagtaattttgaaacttggaactgtacttgaattgtgtatggggtaacttgtaacagtacagataaataaaaattcctttttaggggagctgatagattttttttaatgtctaagttatttatttgtagcatttttttcttatttgtctgcttgatggtttatttgctcaaaatagtctcctgtatccccatacagtaacagatggctttgaactcctgatccttctgcctcctcctatgagcactttgattagcagcatatactaaggtgcccagtttatagggttcttggtcaaagtcgggactttgtgaattctaggcaagcattctcctgactgtacctccccaccctagttttggtgatttgtgggtgctggtgctgtagctgctgttgggttcattttcatctgtaacaacctcaagagaaatgcaccactttaattaaagtctcctacacatgggatacagggacttcaagattcatagagagctccgtcacaacattaatgtgttaaccatcgagtttgtaattttgtcctcactctctattttaggttcatttaaaactcttgaaatgaaggcatccaagcctggctggtggctcctagacacagaggttggagaaaaccaggtagctggcatgcaaacgccatttctcatcatagacaaaggtatcacttgcatgttgtttacgggtgagggagtgcctagtactagactatttccaacttccagattgaaagtaatctgcaagtgtgaaaatgtgaagacgggctttttttttctgaccattaaaaacataacaattatctctacaaccctaacaaataggtcaaatattccatgactggggaaccaatagaaagtgcccttcctcctaatttgtgatccatgggaaaatatacataagaaaatctctaagttcctagagtagagcagaaagagtaatcagaattctgcagtaacaggcagtaatctctccactcatgagcagttcttgccaagcatctgtcgactaccaactacagtgctcacatccaggtacccattatctggtatttctttccttgagcaagatgtaaatagcattgtactctccaggtcaatggccaagagtgcattcttatgagtaatagtccttaatgtaaatagtttgctttaaaatacaaccagatggacatcagcttaaacatactgttttaaagactccagttattttctgctgtgttagttactattcagataagcaccagtcttgctgagtgtttatctctttctaactgggcatattagagtcattatcatggatggtaaatgaaaataatctctagacatagaggttttacttgtcatatgtagtttctgagcaaaaagcatttgtttttgttttttcctagagtgtaagatgccaatgggactaagcactggtgtcatatctgattcacagatcaaggcttcggaatatctgagtaagtatggacatcatagcctgtgaccggccatgcctacagtctcagtatgcaactcataaagctatgcatgacagtcacctatgagccaattcctctctctaggctttcgtctgctatagcttaatgaaacaaccccatttatggggttcctctggaagaggaagaagaaatatttcaggagcaaaaatcctattcatacatttatcatttccacttcttgtgatgtgtattgttcccaaagggcctgttctaggaaaaatcaagaattcaactttgctgatatatccgcctaggcagcccagtagctctacagggaattggcagggaataaataactttatcttatgaccttgtaattatttcccaaattccgtttatcttacctacattgactcacacgcaaaacctccaacaagattcacagggttctatcacctaaggaagagggtctcaatgtttatgctagccattcatctagtcaagaaacattacgatcaaagtatctcttaaaatttttttccttctgcctcaaatcccttcctgagatctagaggctgtcatcaaaagaataatgaggttcccacatattcctcccaagtcttcctgtttggtaggcacactcggcagtagccgtatcaacataactgagaaaacacaaacatgacctatgtgctagaaagggtggatgatggcttacaactgactaaacatggcctgaagccaaggtttcatcactgaggactagcttggcagccaaagttcatgtcacctgcctggtctcataactatagcatataggtctggttctctgctgtactaaacttatttgagaagttggtagttttctattgagggtggggagaattcttcaagccagacatggtagtatatggttgaggcagaaaaacagtgaactttagtcctgcctggtctatatatacaacaagacttttttttttttcaaaaataaattaattcacaaattcctttttttcttcttttgaatttagcttattgggagcccagattagcacgattaaacaatgctggttcatacaatgcttggagtatagaaaaaactgcattagattttcccattaaaccttggatccaggtacgtctaactaacctcataatattggttacgatgatgacaacacaggtcgtgggtttagttgtttcttgaaatggcaatgaaggaaacagccctgagtagatgtagttactgttctcagtggttgctttctcataattgacaatgagaggtaggtcaagtaattttcagtctatgaaagaaaccccaacaacaaaggtgtcaactgctttcccaaagtgcagcacagctagtcagtgcccacactgacattcaagttcagatgtgctttgctcaactgtgggctgtacctcaccacttaatgaatttactaagaccttgggtattcccaatgctaaagaaagctgattatagcttgagttacggtaaggtgtgactcactaacaaggatggttctgtttactcgcttgactgtgttgcaggtggacatgcagaaggaagttgtagtcaccgggatacaaacccaaggtgctaaacactacctaaagtcctgctttaccacggagttccaagtggcttacagctctgaccaaaccaactggcagatcttcagagggaagagcgggaagagcgtgatggtttgagcactcatttctagctaaatcttaaggctcacgctgggctttccatagcagtagcctttcaaattgcatttcggggagttagaaaagtgaatgaatggctttctaagggtcttaggaagtgaaaatgatagtatgatgatgggtctgtacaataaaaaaatcttcaaatctctgcagaacttgaaaggaaaaacattgaagcaagtaccacttcaaaacagattggcagcagtattcagcgcagtgtccacccttgttcaacacagcccctatgctaggaactgcttgtgtctgcaaagggttttgatttttctatcaccttttactttgttctgtatctcacacaccttgatttatggtgattgtggacatccattgatgctctgaggcaccgtccttctctggccaccttagaggacatgccagaggacttacagactcccgtctggtattccatgagcccagacaagatgcctagatcattcctcattcccaggctcctcccccaagaataatatccaaacactgagagcctgtctgccatgattgcacaaacaccttgagtctgtttctgttggtactttatgtaaatcaatcactttaccacgtgctactttttctttgctgtcttgactgtttctagtagtgacatatttgtaatgtagcttagataaaaatcactaaaaaagaaaatcctaaattccggtgcttatcatatcaaccagtaaggggagagaaaacttgatagccatcaaaatcatgccttcaagattttcagatccatatctatgcaggacttcggcatgtagtttgatggttctgtaatttgattgtctcaagctttaataccacagtaatagaagacatgtagatgcctagatcaatacttcctgtgaatcgggaagtattcttttctgtgttctggatgtgatttctgaagtccatgagaatagcttcattcagcagaaatcacccataaaactatcaggacctgaaaggcactttgtgggaaaatttaaattcagtgtttttcattagctgtttggaggttatctgaatatctgaatagtctatttcatattgggtgatttatgatactttgtgtggcatttaaaatatgagttgccttttttctttaagttgctggtcatgtgtgtagggtctaatactagttgtcctccaatcctcctgacatcagagagtcagagtctgtagcaatgttgcttatgtaatctctggtatcatcatttttctcttttacttttagatcaggcctgctgcagacttgtccatttgttttcccatcatttccaagtgccaattcctttattaaattttcttctgtggcttcaattgtgctctgtcttgcagatctactctttgcttctgttttaaatggacgttttacgatacttctctgtgagagaaagggggtggggcacagcctgatgaccgccaggtagaggtcagagtccaggctctccctggacaccttaggaggcattgcttcccttggctgctgagtagatatagagttccacactggtttctcctgacacagctgagggcttcttattgggaagagtctggagctcctaggatggttcttgtaccacttttgtcccaggagcctcaaagtctaaccctttcattatcgccattgcctctatgcttggcttgtatctgggtgtttgttttcctgtgatagttggatggtttacaacagttatctaaggagagttgtggggttttttttcacctataagactggaacatacaaagtaagcaaaaagcccccccttggggggcggggggggcaacaccatgttattctttgattcctgagaggcttgggtagtctgttttcttcatgccctctttccatctttcttttcttcttttatgcatagtcccaagtttctacataacaggaggaaggacaggaaaaagagcatcagcaatagcttcctcgaagtagacatatccacaattagtttttcaaaccaaattaaattgatcccatttctataaaggaaccttacaaaacttgttagatgggactttaaaaaaaatatggtcagtgtttagagaattgttattaatggttttctctctccctctagtattttactggtaattcagatggctctacaataaaagagaatcgacttgacccacccattgtggctagatacattaggatacacccaacaaaatcctataatagacccacccttcggctggagctgcagggctgtgaggtgaacggtaaggggcaagaagtaccaccttcccacggacactctagactcaagattcgggtggtgtgggagaggagcattcttagataacttcagtgccttaggctccagaagaacctttgcaagacaaattccagtagggaatactctcagtgtgatctaaatggaggcagagcctggttctagtagtccagggggtagggtgggggcagcacctcactcctcactgcatggtgtgagcgtcatggacactgtctggtcagcccattttcagtgagagccacctgactctccgtcactgtcatttttttttttttttttttttttttggtgatcagtgatcgatcagtgatcgttttttttttttttaatctgaacctggctttcaacttctgaaaaccatgtgtgtgctctgtgctctgttttggactcgtgtgagaacctgagtcttcctaagcatctacttttttttcaggggatgaaatttgtcttgtgatctaataaatctaggtcataataacagtcataatagtccactgactagtctctgatttttttaaaacaaggctttccaggattgttttaataatttgcttattttttattttatgcacattgatgttttggctgcatatgtgtctgtgtgaaggtgttggatcctggagttacagacggtagtaagctgccttgcgtgtgctgggaatcgaacgcaggtcttctgaaagaacactcagtgctcttaactgctgagctatctctccagatgatctttccagcatttttaactttcaggaacatgcaggaaatactgtcatcgtccaggcattctggggtaaaagacaaaaatacccaggcctcaggtgactgctaaagacaggactaggtgagggatgaagagtcacacacggtgtgtcatgccctgggaagctctctcatcttcccctgaggtaggggagaaaggcccaactcacgtgaagcgagtatctgaactttggaatcaacttcttaccaaagcagatagtgctgcatgtgacatttgtaagagctatgcacagggagggacgcttgcccgtatctggatatcagcagtgtagaaaaccacccatacagaatgcaaatgttgtataggcgggattatcctgtgaagcagatctgtaagtcattggggcggggggggggggtaattcccataatcacagtgtccgtggtagctttggtcaatcatgtagtctaacaaatctaaaatgtgaggtgaggttctgttaatttactaaaaatattccttttctacagaaggagcatggcatttttctcttcgctttttggaacttacatagcaagcagtgaatgtttctttcaggatttttttttctttttttgacatagagaaagcaagctattgcttcaagaaaatgtctgtggttttgtgttgttcccccaaggaaaaacatagtaccactaagacagtcagctgccttcactcactagctaggtttcctatgccaatagttcgtctttgcttccctagaacgctcaaaagtatgcccaggcaaagttctaaagagtgtatgtgttcaaaatgttgaaagtgaaaatagaaaaggtgcctaccaaagccccactacatctccatggcttctgttggcagaaactttcctttcagtacagccatgcattgctgcaccacaggaatcctttcttagaactgcatctttaggccattttgtgttttactgtgcaaacatcatagattgtgtttacccagtaccggccagtcacccaatgtggtcttgatacaatcaagagacagagcaagtgagcataacactacactgtttcacagtgttcaaaaataacgataagaagtatagccaatacacaaagcagttacgttggggtttattattgaatattatgaattgtacataactgtgtgcactgtactacacatgtcttagcacagtaggttgatttatacagacaccatcacaaacacagaggctatatattacttatgacaactatgatgtcacaacagctccatagcctaatgggaccactaggatttgtgtactctgttattaacagaaatgacattatatgctgcatggtggtacgtattgttcagaaccagcatctatctcaaagcaaagacttgagactctacggctgtctgaagaagggagaacccacacttaaatactgtgttgagtgggacactggctgtcagttcagtttcctcttcttctgacagttttgtcatgttcttgtatcttgctgtattctgtgtccacttctgtcatgggtgtatgagcattgaataatatattagtagcatcagagtggtatttgcacttgaattgaataaattgttctttgttttgctgtttcctggaagtgataattttttttgggtcttctgtgttgcaaaatgcagcgcagggatcattagtgctgtgtaattaatcatattactttcctcttgacaggatgttccacaccactgggcctggaagatggacggattcaagacaagcaaattactgcatcttcatttaaaaagtcgtggtggggagactactgggagccctcccttgcccgcctgaacgcccagggccgcgtgaacgcctggcaagccaaggtgacagcaaccatataaatggagttctctcactttccagaaacaaacaatgaccaccaccacaggggacaggagggtggctgggaactggagtgtgagcctctgaagtcccaggtctgagaatctaggaagacttgcagaatcaacagctttcggctctaaccatgactcagagaaaagtcgtacctcttccttgtagttcttgcgagctttgatttaaagcagaaagggacaacagcttgcaaagaactagatagtacatattttaggccagtggttctcaagcttcctaatgttgtgactctttgatacagtgacttgtgttgtagtgaccccaagaataaaattatttttgtttctacttcgtaactatatttttgctactgttatgaaccataatgtaaatgtctgatatgcaggatatctggcatgcaaaccccatgaaaaaccatttgacccccaaaggggtctcgacccataggttgagaaccactgttttaggccaagttttctgtgcattctaagtcctcatgtaagtgaatggggacagtcgtggcttaccagttcctaggtgaggcactttaacattaataacagacaactaattatggtttataacatatctcttttttcataatttgccactttaaaatttttccttccctttctttgtgacattcctcaagtcagttggaggtggcacagttgtaaaaccaggagtctaaatcagtgatttgagttaaacaaacaccttccggaaagttcctttgatcttgctccactaagtattgcaggccattcggtttgaagataactgttaatagctgacttattcttatttcattcttcgcctgatagtgggatcacaatactgcaataactttatgatcccttcagacaagacaatccaagttcattacctagtctcttcccatctccctcccttaagatatgtgttaatatatatgtaaatatatgatagataaatatttatacgtgtaaatacatcctaattcctaaattctgaagaaatcttggttctaatctcagagtaggccagtagaaacaaaagtgtggcaagtgagacccacgcggtggcttaggagccaacccctgtgctctgaaacccgttctcgcctattgtgaactcagcaggctgggctggcagcagtttgtaatgaagcatctctccaaatctctctgtgcacagattaaatctcagcttagtgtcagggcagaatcttggctagaattccattctcggctaaaactccagatgtttccctgtatgaagcaacccaaacatttcattttgcaattctgcagaagaaaactgatactcggagaaactaaaacaattaaaatagtaacattacattacatactgacataaaaatataaaaaatgaaagtgtcatatagttattataccccagatatccctttaaacctgtacatggtaaatcttgtcaccctacactctgttctacatcctttaaaagaaatcctttctatagagttagctttaatcactgggattgtaattaagaccccttcaaataaatgctaactatagttttttaatgtcatatttaatctgaatttctcagtcataaatttctgtttgatctaaccttctcttagcacaaagtatctttatatgatatttaaggaggatgaaaatcaaagccagaaacatgcaggtgtgcatagcctatctgtccatggctgagtgcctcttacctgatatatatgaaacccttcacctttatcttgtaacattgatacaaccttgattttaagtcactctaagatgacacacagagggtctcacaaagttaacaaagttttagtcctttaattcaatcaattttcttaaaaaaaaactttatcatgtaaatatttagatatgtattcatatacacacatatgtccacatgaataggaacaatattgagaaactatcatttattccatccacaattgcatgatacgtctcccaaaggtagaaactcatcccagacaactccagacatgagtccctctgaactctcttcaggagcatgtcctcacggaacatgaggagactttttgtgaggctagattgtagatactcaatcctttctcagacgtccctgaaacaatttacagcatttaaatgaacttgcttaaaacacttgcaaataatttggaaatttattctttttgtttaaagtaaaattcatttgtcagttaagtatccagcagctacttattaaacatcaactatgtaccttgtattgctatgaatacagggggggggaggactaataaagcccccaccctggagcagcaaaagacataaacaagcaaataagcactgtatacagtatgaaatgcatcagtagaatttaaatcttttgaagttggtatacaaagcaataggtttgtgtgtgtgtgtgtgtgtgtgtgtgtgtgtgtgtgtgtgtgtgtgtgtgtgtgagcttctttgtggtgttttgtcattatacttcgctcttaaccatttatttccctttagcgttgtcttccccagtcaggcatactctattactttctctctaaccccccctcccggtcatgatccataacaataaacatgaaattacagggaagtcttctaaaagacagcgacttgtaaaggaggagatggaaaagctttatgcattttctaagcatcttgttcttctatttttggttgtgagcctggcctttaactgctgagccatctctccagccctaaacatcttgttcttaaggaaaagaaaggagtaatacttttctcatctcagtgcttttgttgttgttgttgcttccgtaggcaaacaacaacaagcagtggttacaagtcgatctgctcaaaatcaagaaggtaacggccatcgtaacgcagggctgtaagtctctgtcctctgagatgtacgtgaagagctacagcatccagtacagtgaccagggtgtggcatggaaaccttaccgacagaaatcctccatggtggacaag

SEQ ID NO: 1807 - DNA, 6413 bp, Mus musculus
gggccatgctcctagtctgcccgtgcttcttcctcctggtggttctgggaacccgctgggcgggctggggcagccaccaggcagaggccgcgcaactaaggcagttctatgtggcagctcaggggatcctctggaactatcatcctgagcccacagatccaagtttgaattctataccttccttcaagaaaattgtctacagagagtatgaacagtattttaagaaagaaaagccacgatctagcaactcaggacttcttggacctactttatacgctgaagttggggacgtcattaaagttcactttagaaacaaagcagacaaaccactaagcatccatcctcaagggattaaatacagtaaattttcagaaggggcttcttacgcagaccacacgttccctgccgagaggaaggatgatgccgtggctcctggagaagaatacacctatgaatggatcgtcagtgaggacagcgggcccacacctgatgacccaccatgcctcacccacatctactattcctatgaaaacctgacccaggatttcaactcgggtctgattgggcctctgcttatctgcaagaaaggcaccctgaccgaggatgggactcagaagatgtttgacaagcagcatgtgctcctatttgctgtgtttgatgaaagcaagagccggagccagtcaccatccctaatgtacacaattaatggctttgtgaataagacgatgccagatataacagtctgtgcccatgaccacgtcagctggcatctgatcgggatgagctcggggccagaattgttttctattcacttcaacggccaagtcctagagcagaaccagcataaagtgtccaccgtcaccctggtcagcgcaacatctacgactgcaaacatgactatgagcccagaaggaagatggattgtttcttctctcatcccaaagcattatcaagctgggatgcaggcttacattgacattaaaaactgcccaaagaaaacgaggagccccaagaccctcactcgggagcagaggcggtacatgaagagatgggagtatttcatagccgcagaggaggtcatttggaactatgcacccgtgatacctgcgaatatggacaaaatttacaggtctcagcacttggataatttctcaaaccaaattggaaaacattacaagaaagttatctacaggcaatatgaagaagagaccttcaccaaacgcactgacaaccccagcatcaaacaaagtgggattctgggccctgttatcagagcccaggtcagagacacactcaagatcgtgttcaaaaatatggcgagccgaccctacagcatttaccctcacggggtgaccttctctccttacgaagatggaatcaattcttcctccacctcaggcagtcacaccacgatcagaccagttcaaccgggggaaaccttcacttacaaatggaacattctagagtttgatgaacccacggaaaacgatgcccagtgcctaacaaggccatactacagtgatgtggacgttacaagggacattgcctctgggctgatagggctgcttctaatttgtaagagcaggtccctggaccagagaggtgtacagagggtggcagacatcgagcagcaggccgtgtttgctgtgtttgacgagaacaagagctggtacattgaggacaacatcaacaagttctgtgagaatcctgatgaggtgaagcgtgatgatcccaagttttacgaatcaaacatcatgagcactatcaacggctacgtgcccgagagcatttccactctgggattctgttttgatgacactgtccagtggcacttctgcagtgtgggaactcatgatgatattttgaccatccacttcactgggcactcgttcatctatgggaggaggcacgaggacaccttgaccctgttccccatgcgtggtgaatctgtgacagttacaatggataatgttggaacttggatgttgaccaccatgaattccaatccaaaacgcagaaacctaagactgagattcagagatgttaagtgtaatcgggattatgacaatgaggactcatatgagatttatgaacctcctgcacctacatccatgacaactcggagaattcatgattccttagaaaatgaatttggcatagacaacgaagatgatgattaccagtacttactggcgtcatcattaggaattaggtcattcaaaaactcatcattgaatccagaggaaaatgagttcaatctcactgctctcgctctggagaacagctctgagttcatatctccaagcacagacagagttgttgactcaaactcttcacgaatccttagtaaaatcatcaataataacctcaaagactttcaaagaacacttcctggctcaggagccaccgtggctggtaccctccttagaaacctcattggcttagatgagaacttcgtcctcaactcttctacagaacatcgttccagctcatatcatgaaaatgatatggaaaatccacagtcaaacatcacaatggtatacctacttcctcttggtccaaaaggatctgggaatcgagaacaagataaacctaaaaccatcaagacaggaagaccccacatgatgaagcacaggttctcctggatgaaagcgccagctggtaaaactgggaggcattcaaacccaaagaattcgtattctggaatgaagtctgaggaggacattcctagcgagttgatacccttaaagcaaaagatcacttccaaatttctgaatagacgatggcgtgtggcttctgaaaagggtagttatgaaataatagcagcaaatggtgaagacacagatgtggataagctgaccaacagtcctcaaaatcagaatatcacagtacctcggggagagagcacctctcacacaaacacaacaagaaagccaagtgacctcccaacattttctggagttggacataaatctccacatgtaagacaggaggaagaaaacagtggttttcagaaaagacagttattcatcaggacacggaagaagaagaaaaataagaagcttgcactacacagtcctctatctccaaggggctttgaccctttgagaggacataaccattccccatttccagacaggagactacttaatcactcactgttactccacaagtccaatgaaacagctctttctccagacctgaaccagacctctccttcaatgagtacggacaggtcacttcctgactataatcagtactcgaaaaatgacactgagcagatgagctcttctttagatctttatcagtcagtgcccgcagaggaacactctccaacatttcctgcccaagatcctgatcaaacacactctaccacagatcctagctacagatcctctccgccagagctcagccaggggcttgattatgacctaagtcatgacttttaccctgatgacattggtctaacatctttctttccagaccaaagtcaaaagtcatctttctcttcagatgatgaccaagcaatcccttcctcagacttaagcctctttaccatctctccagaattggatcagacaattatttacccagacctggatcagttgctcctttctccagaagacaatcagaagacctcctccccagacctgggccaggtgcccctttctccagatgacaaccagaagacctcctccccagacctgggtcaggtgtccctttctccagatgataaccagaagacctcctccccagacctgggtcaggtgcccctttctctagatgacaaccagaagacgacctccccagacctgggtcaggtgcccctttctccagatgacaaccagatgatcacctccccagacctgggtcaggtgcccctttcttctgataaccagaagacctcttccccagatctgggtcaggtgcctctttttcctgaagacaaccagaattacttcctagacctgagtcaggtacctctctcctcagaccaaaaccaggagacctcctccacagacctactgactctctctcctgattttggtcagacagtcctttccccagacttggatcagctgccactcccttcagacaatagtcaggtgaccgtttccccagacctcagcctcttgaccctctcaccagattttaatgagataatcctagccccagaccttggtcaagtgaccctctctccagacctcatccagacaaaccctgctcttaatcatggacacaaagcatcctctgcagaccctgatcaagcatcctaccctccagattctggtcaggcttcatcgcttccagaactgaatcggactcttcctcatccagatctcaactcacatacccaccttccttcaccatctcccacactcaataacacttctttgtcaaggaaatttaaccctcttgttgtagtaggtctcagtagagtagatggagacgacgttgagattgttccaagtgaggagccagagagaatagatgaagattatgccgaggatgactttgtaacctataatgacccctacagaacagacactaggacagatgtcaattcctccagaaatcctgacactatcgcagcatggtacctccgaggccacggtggacacaaaaaattctactatattgcagctgaagaaataacctggaattacgcagagtttgcacaaagtgaaatggaccatgaagacacaggccacactccaaaggacaccacatacaagaaagtcgttttcagaaaataccttgatagcacgtttacaagtcgtgatcctcgggcagaatatgaggagcaccttggcattctcggtcctgtgatccgggctgaagtggatgatgtgatccaagttcgatttaaaaatttggcatccagaccgtattctcttcatgctcacggactttcctatgaaaaatcctcagaggggaagacttatgaagatgaatctcctgaatggtttcaggaagatgatgctgtccagcccaatagcagttacacctatgtatggcatgccaccaagcgctcagggccagagaaccctggttctgcctgccgggcttgggcctactattctgcagtgaatgtggagagggacatccactcaggcttgatcggcccccttctgatctgccggaaaggaacacttcacatggagcgcaacctgcctatggacatgagagagtttgtcttactcttcatggtctttgatgagaagaagagctggtactatgaaaagtccaaggggtcacggagaattgaatccccagaagagaaaaatgcccacaagttttacgcaattaatgggatgatctacaacctgcccggcctgagaatgtacgagcaagagtgggtgaggctacacctgctgaacatgggcggctcccgagatattcacgtggttcacttccatggccagaccctgctggataataggaccaaacagcaccagttaggcgtctggccccttctgcctggttcatttaaaactcttgaaatgaaggcatccaagcctggctggtggctcctagacacagaggttggagaaaaccaggtagctggcatgcaaacgccatttctcatcatagacaaagagtgtaagatgccaatgggactaagcactggtgtcatatctgattcacagatcaaggcttcggaatatctgacttattgggagcccagattagcacgattaaacaatgctggttcatacaatgcttggagtatagaaaaaactgcattagattttcccattaaaccttggatccaggtggacatgcagaaggaagttgtagtcaccgggatacaaacccaaggtgctaaacactacctaaagtcctgctttaccacggagttccaagtggcttacagctctgaccaaaccaactggcagatcttcagagggaagagcgggaagagcgtgatgtattttactggtaattcagatggctctacaataaaagagaatcgacttgacccacccattgtggctagatacattaggatacacccaacaaaatcctataatagacccacccttcggctggagctgcagggctgtgaggtgaacggatgttccacaccactgggcctggaagatggacggattcaagacaagcaaattactgcatcttcatttaaaaagtcgtggtggggagactactgggagccctcccttgcccgcctgaacgcccagggccgcgtgaacgcctggcaagccaaggcaaacaacaacaagcagtggttacaagtcgatctgctcaaaatcaagaaggtaacggccatcgtaacgcagggctgtaagtctctgtcctctgagatgtacgtgaagagctacagcatccagtacagtgaccagggtgtggcatggaaaccttaccgacagaaatcctccatggtggacaag

SEQ ID NO: 1808 - protein, 2130 aa, Mus musculus
MLLVCPCFFLLVVLGTRWAGWGSHQAEAAQLRQFYVAAQGILWNYHPEPTDPSLNSIPSFKKIVYREYEQYFKKEKPRSSNSGLLGPTLYAEVGDVIKVHFRNKADKPLSIHPQGIKYSKFSEGASYADHTFPAERKDDAVAPGEEYTYEWIVSEDSGPTPDDPPCLTHIYYSYENLTQDFNSGLIGPLLICKKGTLTEDGTQKMFDKQHVLLFAVFDESKSRSQSPSLMYTINGFVNKTMPDITVCAHDHVSWHLIGMSSGPELFSIHFNGQVLEQNQHKVSTVTLVSATSTTANMTMSPEGRWIVSSLIPKHYQAGMQAYIDIKNCPKKTRSPKTLTREQRRYMKRWEYFIAAEEVIWNYAPVIPANMDKIYRSQHLDNFSNQIGKHYKKVIYRQYEEETFTKRTDNPSIKQSGILGPVIRAQVRDTLKIVFKNMASRPYSIYPHGVTFSPYEDGINSSSTSGSHTTIRPVQPGETFTYKWNIFDEPTENDAQCLWYYSDVDVTRDIASGLIGLLLICKSRSLDQRGVQRVADIEQQAVFAVFDENKSWYIEDNINKFCENPDEVKRDDPKFYESNIMSTINGYVPESISTLGFCFDDTVQWHFCSVGTHDDILTIHFTGHSFIYGRRHEDTLTLFPMRGESVTVTMDNVGTWMLTTMNSNPKRRNLRLRFRDVKCNRDYDNEDSYEIYEPPAPTSMTTRRIHDSLENEFGIDNEDDDYQYLLASSLGIRSFKNSSLNPEENEFNLTALENSSEFISPSTDRVVDSNSSRILSKIINNNLKDFQRTLPGSGATVAGTLLRNLIGLDENFVLNSSTEHRSSSYHENDMENPQSNITMVYLLPLGPKGSGNREQDKPKTIKTGRPHMMKHRFSWMKAPAGKTGRHSNPKNSYSGMKSEEDIPSELIPLKQKITSKFLNRRWRVASEKGSYEIIAANGEDTDVDKLTNSPQNQNITVPRGESTSHTNTTRKPSDLPTFSGVGHKSPHVRQEEENSGFQKRQLFIRTRKKKKNKKLALHSPLSPRGFDPLRGHNHSPFPDRRLLNHSLLLHKSNETALSPDLNQTSPSMSTDRSLPDYNQYSKNDTEQMSSSLDLYQSVPAEEHSPTFPAQDPDQTHSTTDPSYRSSPPELSQGLDYDLSHDFYPDDIGLTSFFPDQSQKSSFSSDDDQAIPSSDLSLFTISPELDQTIIYPDLDQLLLSPEDNQKTSSPDLGQVPLSPDDNQKTSSPDLGQVSLSPDDNQKTSSPDLGQVPLSLDDNQKTTSPDLGQVPLSPDDNQMITSPDLGQVPLSSDNQKTSSPDLGQVPLFPEDNQNYFLDLSQVPLSSDQNQETSSTDLLTLSPDFGQTVLSPDLDQLPLPSDNSQVTVSPDLSLLTLSPDFNEIILAPDLGQVTLSPDLIQTNPALNHGHKASSADPDQASYPPDSGQASSLPELNRTLPHPDLNSHTHLPSPSPTLNNTSLSRKFNPLVVVGLSRVDGDDVEIVPSEEPERIDEDYAEDDFVTYNDPYRTDTRTDVNSSRNPDTIAAWYLRGHGGHKKFYYIAAEEITWNYAEFAQSEMDHEDTGHTPKDTTYKKVVFRKYLDSTFTSRDPRAEYEEHLGILGPVIRAEVDDVIQVRFKNLASRPYSLHAHGLSYEKSSEGKTYEDESPEWFQEDDAVQPNSSYTYVWHATKRSGPENPGSACRAWAYYSAVNVERDIHSGLIGPLLICRKGTLHMERNLPMDMREFVLLFMVFDEKKSWYYEKSKGSRRIESPEEKNAHKFYAINGMIYNLPGLRMYEQEWVRLHLLNMGGSRDIHVVHFHGQTLLDNRTKQHQLGVWPLLPGSFKTLEMKASKPGWWLLDTEVGENQVAGMQTPFLIIDKECKMPMGLSTGVISDSQIKASEYLTYWEPRLARLNNAGSYNAWSIEKTALDFPIKPWIQVDMQKEVVVTGIQTQGAKHYLKSCFTTEFQVAYSSDQTNWQIFRGKSGKSVMYFTGNSDGSTIKENRLDPPIVARYIRIHPTKSYNRPTLRLELQGCEVNGCSTPLGLEDGRIQDKQITASSFKKSWWGDYWEPSLARLNAQGRVNAWQAKANNNKQWLQVDLLKIKKVTAIVTQGCKSLSSEMYVKSYSIQYSDQGVAWKPYRQKSSMVDK

SEQ ID NO: 1809 - DNA, 72409 bp, Homo sapiens
gaaaaagcggagggagtgagagccagaggctgctgctgccgtttgcaagaactgcaggggaggaggacgctgccacccacagcctctagagctcattgcagctgggacagcccggagtgtggttagcagctcggcaagcgctgcccaggtcctggggtggtggcagccagcgggagcaggaaaggaagcatgttcccaggctgcccacgcctctgggtcctggtggtcttgggcaccagctgggtaggctgggggagccaagggacagaagcggcacagctaaggcagttctacgtggctgctcagggcatcagttggagctaccgacctgagcccacaaactcaaggtaactcaggtgtggagtccgggtgggcttctctagagaggaaaatctatttcttttagagaacattccctttgcaatgtcatggctttttttttttttaacttcaggtaagtaaatataactaataggagagtatactgaattaaataaactgggcaaatgctaattttgcatccaacaatgtagtttatcattctgagggtttagaaagcaccctatttgattggttagatgctaccttcttttcaagtttattttcaatacagttttgttagtatgtttgtgttggcttatatattggttaattcaaaggcaccaggcacttgctccctcattagcccttcctgcaaactcctgttccagatttttagttgtatagtatttttatgagactcctagttacatattatttattccattgtctacatagcttcatcttctaaaactaaaaatgaacaccttgtgctttttgtcatataattttattgctgccttataaatgactttcaaaatatcatcagttcttgtatgtttttgtactttcaccttttttctgcttcatatttgacttatttatcctattgaatgtgactcttcatttttttttctctctgttcatcatgtcctgggatatggtttaccttggctacttaaaggcatatgtaactgagaggaggtttaattcagataaaatactatccttgagttgcaaactattttttctaattgaaatgttaaaaataagacttctcagaaattaactaaatcatacagtctattcaatatttccagttagttattttttaaatggtaaacctgctagtgtgactcactttttttccttacatcacacttcattatgaaagatgtgttcctcttttacaattacaaaaccaaagtaatctgccaaaaaataatgtaatattttgagatcttttagtgtataatattaacctttttaaaactctcattgtaactgggttattttggagggtattacataccatcttggtcttataataagaagagatccctccttctcaaaaataatcattttaaatatcgtacttcaaagtgataatctaggtcacacccacaccctttgggaactgccgtaagctaaaaccccaaggaaaataacagtccttctaacactaatcttgcctgctcatgagtagaatgcagacttggttgttggctttcttgtagcatgctgggttcatgcttgggagttttttctcttgtctgtagttagcgttgaaaataacaagcaaaataccggaggcagaaccagatagggcaaaggtctgattcacatggtgagtacacagggaaccatgactggtcattctgtcccctcatcctgtgggtaagtttccaaagttctggagattcgttcctctggtagcaattgttgagtcaaaaccatagaaacacaacccagacaaactgtcatattgtttaaccctaaatcatatcatttctctctagcattttcttatgaaaaatctaatccatatatctggctgcttaaactaagaacttgttctaacttgtcctgcccctagagctatgatactcactaggtgaatatcaacatagccaactccatcttttggcaaagtgtattttagcacaaagcagacatctatctacttatttcatataatattagcaggacaatgccttttaaaggtaaaatgtatctattattcttgctccaagtctaaggtgaacactttcaaaaatttccttagaaaacttgtttagtcactcacatgtatacaaagagatattgaagaaaagatatacatacattttccttctagggttctagctttatatgattttgtgattatgaacaaatcatctttaaacaatccttataaatgaaaaactcgtcgtacacattgtttgaattcatatgatctgtaactttttaatcagatagattattttccaatagaaattgttcagatcaaaatagacatacctcagtatgaatacacagcatacatagtaaaaacatgttaggaaacatctctctgttgaaattactccacgtaagagactgatattttttagtaaagattttacaccatcatctacatttctgtattaaagatctggggcaggggaggacaataacttttcaattgtactaaaaataaataaataaaaatggacttccacattagggacattagtatatagaatcctggaattcttaagttagaagaatgctaagagttcatttaattcatattcaacttccacgctttaaccttctacttttcccctttccctcagcaccaatgaccttaccaagtagttgtctaatttctacttgaatgcttccagtgatggagaatccactaccttctctatctagctattctaaaagtacttacgtgcctcctttaattctgcccccacatattaacacagtttctgtattccacatattacaatttgtgagcattactgtaactacagatttgtttttgctttctgagaaaacctgaagggtaaagactaactcttattacatttacaaaataatattactagctaacatggattgagtatttctagtgtgccagctctatgccttttgcacatatcaacttatttaaaattatacaacaattctgtgaaggagatttcagtattaatctcatttcatagttgtagaaactgaggcacaaatggatgaagtaaacttttcaaagtaaaacaataagaggtagatataggcttcaagtccagagatactgaattcacagcctgcaccctagccaccgcgctgtatagaagtcatggcatatgtgggtgctgttatgtcttgattatggctgggccactgtccccacattaggaagcaaaacaaagccactctgatcaactgatttagacatttgcaaggtattttctccaaattctctttccttttaccctcatctttgagtttaagacaaggataagactgatttgcctttagaggtacagaacaataacaacaacagcaaaaacaggaaagtaacccaccactcacaactctccctgttgtctgtcctctctctaattttatttaaaatcatgaatgcagtggtttcacattttttaatcttggttctgccacttatcaactgtatctcttggacaagttactgactctttccaaaacagttttttcatttgtttgtttccaatatgaatcccagggcttttaccccattagccatctctcacctctcaactagaaataaattccaccaaatcaatactttttcacaatgttccccagtagattaaaactatatttgattgatcagttgaaaaacagctcatatatttattcataaaggatttggtcatattttaatcatataaaatctaaacctacagtttgggtttctactgtgatattgggttctttttagaaaattgattctgaggaatgatattagggtagattaacttgtgaacaaatagttatcacaacaggatatttttgaagagaccaataattatttcattaactttacttattgatcatatttataaaactgtggacttctgaaatacaataaagatactggtattctactagaagtctgaagatatgagagatctactttttttgtaatgtgagaaatagatattgaatatgcctttcaaattagtttttgtattttatttccagtttgaatctttctgtaacttcctttaagaaaattgtctacagagagtatgaaccatattttaagaaagaaaaaccacaatctaccatttcaggtaagcctgaaatatacttttttaattttaaagataaatttctatgggtaatttggcattcacatgcatctaaaatatccatttactgaaaatttatagaaacgtgtggttttttttttaagaagtactggctacataatatgtggggcccagtgcaaaatgaaaatgtgagtccccttgttcatattattgaaaatttcacagtgactgcaaagcattaaaccaagccaggggccctttggggcatggggccctgtgaaactgcccaggtcacatacccatgaagctggctctgtttttaaccttgattaaaataactaaataaaacttataagtgtttgaatttttattcattcatctaaaaaactgttattgagtacctggtatgggctgggcattgaaataggcattgtggatgcaatagtggacaagacagtctcatatcctgggttcatggagattatggtctagtttaatgagcatagatgtgccttcgcaaaatgatattttgcttccatttggctccctagattcattcaaaggaactatgtatggctgactcttttgcatctctttcccgtctattcttctgtttatttagtgtgatatatacaatagccataatttttaaagaaaatctcttattttttcctcatctcttcctttatcaagaagactgggttgaatagggttctaatatcttaactatgataccatattccgcagggatgatagagaccatcaagggagaacttcctccagttgaatccccttgtcagtaattcacctgtccctttccccaatcagatgaagacctgctgtctttcccagaatcatcctagtctgtcctgcctcttctgatctcctttaatcttcaatatttagtcaatgggagtcttcctttcagttaaaaatcaacgactaaaccaaaaccaaatcaaaccatgtccagttaactcctatctagaaaaagaaaaaaaaaaatctccccttgaccctgcctgccttttccttttctctcctttccttcactaccagttttctgtatgagaactctgtatcattctctacatttcttcgcctatattccttccctaatctgctttagtatgaataagtctactaaaattactctcacaaaagggcacctaggacttgaggtgccagagcctatgttcttttactactagacattactaggacatttaacactcttcctttctgaagctctcgctttacctgttttttctagtgccacttccccttggttttctcagacttctcttaccactcctgctcagtatccccaccagatattcttccccagggttcgaatctcacccaaaaccaaggctttcactactacctacccagaagccactttccctctgaagctacattgacaccccctcaataccagcagaattaaatcttccctcttctatacatccccagtaccttgaattaatccctaccttctaaagatattaagaggatcaattgagttaataagtacaaagtatttataatgatgctgacacataataggcactcagtagaagttagctacattattgttattgttgctgctattactaatcataacttagatcatatatatcatagtattatggatatctatatatctatatttctccactcatttatatagtcttcacatgtgttcatttatatatttatttaattttaaacagatctgcatttaaatattcttttatttttaaataattgtgtattgaggccaggcgtggtggctcatgcactttgggaggccaaggcagatggatcacttgaggtcaggagttccagaccagcctggcccacatggtgaaaccccgcctctactgaaaatacaaaaattagttgtgcatgatggtacatgcctgtagtcccagctactcaggaggctgagacatgagaatcacttgaacccaggaggtggaggctgcagtgagctgacatcgcatcacttcactccaacctgggtgacagagcgaaactctatctcaaaaaaaaaaaaacaacaacaacaacaacaaaaaagtatattgagaacctactacattctaggctctgggataaagtgaataagacatggaccttgatttccaggagccaatcagctattggggataacctatggatagacaagcaatgacagtagagtaataaggaagaactatgatgaggattctgtagtaggacataggagacctatctccagtctggtggtcaggaaagtatttctatttctagattgatagctgaaaaaagagtaggatcttggaaagccaagtggggaggcaaggggttgggtgatagatgcattttaaaccaaggcacagaatgtttaaaagtttggaggtgagagtatggtatatttgtggaaccataactggatcagcacagttggaccacaaacttcagggaaggaattaacaagagatgcaactagatggggatcagggatccatgctaggctttatattgagaggaatagggagtccctaaaaggatttcagcaggagaaatatttgtcctttagaaagattatgttgtccaattatagagaatagattggagaaagaccagtccagagccagagaaagtagtcatgggactgttgtatcaatccagatagcagagaagctgagatggagtccaaagatatttaggagctaaagttgattaaacttggtgactcattagatgcagataatgaggaagaaaagggaattgttatggacttcaaggtgtctggtttgaacagcagaatggatagggtgccattcagtgagaaagaaaatgtaagaaaaggagatagtttgtgagagaaggtgataagtatagatttggagtctgaggtgtgtatagaatatctacctagagatgttaagtgagcagacgggtgtagaagtttggccctcaaaagagagatctgagctagctgtcaacatttgggagacatcagaacaaagatggcaaatgaagaatttagagggtgtgaactcacccagggaggatgtgatgagaagagaaggctgcagacagagctcaaagtagcagcaaagtccaagggatgagccaagaaagaaaagtttaccaaggagcttgagaaagcctgttcagggaggggagaagaaatctagagaatgtgttatcctggaggcaaagggtcaaatgctattaatataagggtcaaaatatggtccctttgttatggaatagtgggacaagaccagatggcagggtgttgaggagtgaatggaaggcgaggaaactgaagcacaagggtcttatagataactcttccctgaaacttggttccagatgggaggagagacagggtagtttcgggggtgggggtgggtactgaggagcttaaggacatttgagaattttataaaaaggaatacagagacttaaatatttaagggaagactctatagaaatgccatgaagtcctttccaatagaaaatgtggggataaaacatctgagagagaatgattaatggagacttagaagaagcaggaagcattgggattcaaaccttgggctggcttggccttaggtagaatggctaccaccttcatggggggccaggaaagcagaggataacgttgcaaataaaattaagtttgtagttatgagtaggaagttgaaggatgtcctgtcctatatcacagagtctattcattttcatagctccagctccaagcttagcatgtacaatagatacttaagaactatttaattaaattaaattgtaggtagatgaagggaatataaggtgggaaacatactcattagggccaggaaaagaggattggggccggtatttgaaggtgtaccttttgtggcttttgccaagctaagcaaattttaatccctttgctgtgtgagacattgtgctaaatgccataagagacggaaaggactaattccaggctgaagacttttaaacaataaaaaggcatggatagcttttgaagaaaagggttctgtgatcaaagtcctttcagatgattaaattttttagtgatttcctgatttaaccttgttagaggtagactctgacagttggtgagaacagtctccaatttatgtgtgaggcctttgcacctttctgtcaacccctgtgtatctcagaatatatttgtttcatgtggacaaaggtgtttcgacgtccattttaatgtaatctcttcctgaatgtccaaagttgcttaactatgaacttatgaagtgcaggagtggtatcttattcacctttgtaactctatagtagttgatacaaggaggcaaatctggcgtgaaggaaaagccttttattttgactgagaagatctggatttgaacactgccattaactatgtggcctctcccattccccagactagtcctgtgttatttgtacctttcccctatgtcctgctccactcatctgctgggtgtgattctagctgagccctgaaaaagtcatgagcctcactcctgcagcatgaactattgttgttgttagttcttgtaattgtagggggctgggctgtaggattggaggtatgaagatgcccatccaataaggtttgtggacatttgggcaggtgagggagtacagctggggtcatttttaggaattctgtcttgggctttaaaatggctagtcttggctgggcatagtggctcatgactgtaatcccagcactttgggaggccaaggtgggaggattgcttgaggccaggagttttagaccagcctgggcaatgtagtgagactctgtttctatttaaaaaaatacatacatatatatatatatatatatatatatatatatatatatttaaattagccagacatggtggtacatacctgtcatttcagctactggggaggctaaggcaagagggtcatttaggacaagagcatcacttgagcccaggagttggaggctgcagtgagttatgatcacaccactgcactccagcctgggtgacaaaataagacctcatctctaaataaataaataattaattaaattggctagttttgagtctgcatatttttcagggacaaattataaaatgtttgtccctgaaggagttttgaaatagctgcaacaatcactaccttgtgttatgtaatgcattgttcacctaagagcaggggattggattagttgaccttctgcagtcctttccagttccacaactgcactaaattgggtacatgctgtgctggcttccccaagccctgaagtaggccactcctttccccaatccagctttgggcactgaggagagggttagaagggttttaggccatctggctgttggaggagctaaagagcagcttgaaaaccatttagccatgtgttttcctacatgcgtgaaagtatttggtatgcatttatgaaaacatccttttgttttgccttaaatctgaagaagcaggaggggaggttgaataaatactccaaactgtccactgaagtaataggtcttattaggttaaataacttaggagactttctctgggcatctggtatttgcaggcatgtgatgccaacaaacaaatcaaccaagcaagagaaccatggcaactaaatgcggcacacaattggcagcatagtcagcaccctgttgggctcattggcagctggggtaggtgggaatagtcagtggaaacttccatcaggagccaagacagagggtagcagctggaagaggggggtcagtcagtggagtccgacatgtcaggagtcaaaagaggtgtagacatctggactattctataaagatgggggcctgagcctgccccgtggaaggaatagggagagctttggctcaggagtccagagatctgagttctgatcccagcaatgctaccagatcactgactgaccttgggcaagtcacctttgtcccccgattcctacctcccaggctttgttaactaaaataaggactgaactttgtgacctccacagtcctgtgtaaagctaacataaaaacaaacaaaaagcttcaggcacaagatcagaataaactccaggagtaggagttcaaggaaaggaataggacaaccgtgggtggcaagacaggggtagggaaagataggacctctgtcccagaaatcagagtttaccattgcttctgtaaccagttactgcaaacttagtggctaaaacaacacaaatttattcttttatgattatatatctgcagatgagaagtccaaaatgggttttattgggctaaaatcaaggtgttggcagagctgcattccttctggaggctctgggggagaattgtttccttgtcttttccagttactggaagctgcctacactcacgggctcatggccccttcctccatcttcaaaaccagctgagtagcatcttccaagctcttcctaactcagattctcctgcatccctctgataaggacctttgttattacatgggatccacctggacagcccagaagaatctcatctcaagattcttaatcatagatacacagtcccttttgccatataaagtagcatatttccaggtcccagagattaggacgtggacatctcagcaggggcacattattctgcctactacacccaccaaacaaagccctcccacggtgtcctccatctcagagaatggcaccctcctccacccagctccccaaatcagaacctcatcagccatccacagcaactgatgtcctttattctctaccccacatccaatccatcttcaagttccaactattttatctcataaatacatcactaatatattctctcctcatcatctcatcataatctcagtcaccaccatctctcctggagtcttctatctgttctctcaattgttctctgctcagtctcctccgagatcatcctccacaaatacagccagagattttaaaaccaaaatctggtccatgttgcacccctgatgaaaactctttaatggcttccagatactcttaggctaaagggaaaactctatgaggcttacaaagccctgcatgatgggactctgaggatgccttcggcttcaccttctgccccttcctttcacatactaagctccacctccccactggataactgtcagttctctaaaaaggccacattttctggcacctcagggcctttgcgcacgctactctaactttttagaatgtctttggccatcccttttcctctctgcctttggacctcagttaaaggattaattcctcgggaagggattccccaactcacctccaattggactagattccactgtcaaatactcttcagagtattccctccttttctgtcataatatttaccataggtttaaattgaatgtttttgtgatcatttgtttaaaatctgtctttcctactataaaaacgtataaagttatagaactataaaaatgtttgacttttataaactctatgaaggcagggagtgggtgtatctattttactcttttacgcaccattgcaattctgatgcctaggataatataggcacttgatattcattgaataaataaaggaatgaataaaggaatgaatacaaggtggaggtgtagtataaagaagtggcttaaaagtcacgatctagagacagacatattaaactttaaatcatgatgctgtgtgatattaggcaagatatttaaactctctgaggctcagtgtcctcacctataaaatgaggatcttaatatctaccttaaaaacttgtgaggattaatgtagggacttacagtgcttgaatgtattaagggaaacagtacaggaaagccttattatgattatcatcaccactgcaaacaaatgctggctgaactccatgagtgccgtgacttccttctcctgcttctaggacgcctaatggcgagaagccaatcccatgacacttgtggatggctcagaaatgacagtagttgatttctgtcacttgtctggaatggggcttttggtcatagattctcaagatttcaaagacatcaagatcaccaaggagcacacgttaaagtccagattcccaagtttcacctccagaactcagattcattgaggctgaggtgatatttggaaatctgcctcttattaagaccctaggtgattctgatgcagagactccaaggactacactttggaaattctagtacagtcatcccttggtatccacagggtattggttccaggactactcacagataccaaaatttgcagatgctcaagtcccttatataaaatttcatagtatttgcaataacctatgcacatcctctcatatactttaaatcatctttaaattagttataatactgaatgcaatgtaaatactatgtaaattgctattatgttagagttttatttgtattgtttttattgtttattttttattgttgttttttgaatatttttgatccaaaattggttgactccatggatgtgtaaccatgaatatgaaccatggtcatggagggctgactatatacaattcctcaaattctgactcagccatcaactttttccctaactccccagacagaatttgtgcttcatcctctcttcttctgtaatattttgcccatatctcagcagtcgctcctatcatacatctatctccaaactagcttgtgagttccttcagtacagggactgtatttgatccaggtagccagaaactttctaacacagtgcctggcatgtagaaagtaaaacctcattcttgatttctgcacccataacctcctgtctctgctgtgttctcccattgcagtaactaataacatcatttacccagttgttctgataaaacaccttgaggtcatccttgacttctgtctctcacaagccacatgcaatccatcagcaagtcttgtttgccttacctacaaaaatgtccagactccaaccactactcatcacgttctgctacatgtgctggcccagtacactgcagtctctttcctatactgcctaatctctctgcttccattcttgtccctacacagactattctctacacagcagctatgatgaactttttgttttaggatgaacttttaatacacgttatactatgtctctgctgtacaaagtggtttttcattttacttagaaatgctccatttcacttagacgaggcgtggtggctcacacctgtaatcccagcactttgggaggctgaggcgggtgtatcacctgaggtcaggagtttgagaccagcctggccaacatggtgaaaagtcatctctactaaaaatacaaaaattagctgggtgtggtggtgcatgcctgcaatcccagctacttgggaggttgaggtaggagaattgcttgaacccaggaggcggaggttgcagtgggtcctgagattgcatcactgcactccagcctaggagacagagcgagactccatctcaaaaaaaaaaagaaaaatgctccagtgatgtcccatttcacttagaagaaaattcaagttcttaccgtagcccatagggcctcccttgttctacacacctaccatccacctcatctcttctttcttcccgtactgtttttcttactgttccttagatacatcaagactactcctgcctcagagccagagagctgtgtgatttggttcctcaattcatctaggtctctgagcacacccatgtcagagaaatctaaagtaactaccctctcgcatcaccctctgtaattgaaatgaacatctttcttaagcaaagaaagttattgctaaggaatgacagtgggtcaaagtgggcaagacttggccagaactatttctcctactctgttgacttcttttgggtccaggacaagtgtttctaccattctattgtgatctgtgtacatgtaatgttgagttaatgagctgctaaaaccttctagattgaaaataagtgagtcagcctcaggaccaggaggaatggtagcaatcactcttggtatcatctgtttgtttttcttgcttagcaactctgcctttgatgaccctgaatacagacatagtttaaatatttgttttcacaggacttcttgggcctactttatatgctgaagtcggagacatcataaaagttcactttaaaaataaggcagataagcccttgagcatccatcctcaaggaattaggtacagtaaattatcagaaggtaagataaatctaatatttttctgaaaagggaaaatgtctaagtctttaataccagcatcaacatttaaaactatactgttaaccacgtgttgttagggaaatctcttgcaactggtaattataaaaattgttgctgttgtaagttttgagagaagaaaaggaaaaggttttggagtcctctagacctgcatttttcactgggttcttactctttaatgtttgggagggcaagttatctaatttctctgaattctcatatgttcatcttaaaatgggaataataatacatacattgaaagatggtttaaggcgggggtcagtaaatttttccgtaaagggccagatagtaagtttgtttggctttgcaggccataagatctctgttgcaagtactcaactctgccttttagtacaaaagcagccatagacgatacctatttttttggctttggttacagatgccagaactaattaactttgttaccgtattctttccctcaagtcatacaccagagtaagaccgcctctgacaatacaattttatttacaaaaacaggaaattggttgggtttggcccatgagccactgacatagtgacatagaactagcctgatataggcttcctggcacatagatgacactcaataagtggtatttggtggtggtgagactagaagcattaatagtattagacttttggacatagtgaagtggttaagaaagtaagctttaaaggcagacaagttaaaattctagctttatcatttctgattctacgactttagcatctctgagcctcagttttctcatctataaaatggaaatgattataaccacccataagattgcctgaaatttaaatgaagtcacttaggtagagtactaaacatggttcctgggatcggataagctctctataaataatgatgacaatgatggcaataatcataaagataatagtcatgcaagttattgtatcagccgctgaatagtaagtacctgatgttaatatggttctaattatcccattatgctgatgttcagatcattgtaagcatagtagagttccatcaggcactggtataaaaaattgtatccatattataatagttgttggtatgagaacattttaaaataatttcagacttttcatggttcacatttaaatatctttccttctacatgttccagccatcatacctttgagagaataattgagtaggagagtggtttatgtgcaggttttagaactagactaataagtgcaaatcctggctcagtgacttttatgaagttatttaacctctgtgtgcctcatctttctcatctgtaaaatggtaataataatcatgtctctgtcatacaggtttgttgtcgtgaaatcttagaataatgactggcatataacagataataaatattagccatgatagtaaagataattcttcaattaaaatgtgttcaaataatttagtatttatcttaaaacttgttagtttcagaaaaaatcagaaagtaatttttaaatttattgttttctatataaactgttgtcaaactcatacccactaaggtataagtgactgataataggtcaatgaactaccttccttaggagtacttgcattagcacttaatctttggcttgaggaaaaacaatgaagcattaactgtggcactgagatttcttccaaagtgaatttggcaagactctgggtgaggtagtgggaacaggagtttctcctatgttcttaaaatcatacagtgacatagtgaacaaccacttcacctacttatgaggcttctagacgactgcatcagaagttcagcaatgtaaagaagaagggggagaaacctcaaaatatcaaaatgtcacatgcaggtttcatttcaaataagggaggaggtaagaattgtagactttggaccctacctgggctgtttgcacagtgaatgaaccttgcaacactatccctcttcctttactgtttatttgtccctacattccctacagccagcaattatttatgagcaattgcttaaaatgctcccacagctttcactggagacatgattattggcatataatattgcctctggtcctatgaatctaagaaaggtaaatacatattggtagggaaagtaaaattttaccttggaaatgagatgcaaacctagtaagcagatagtatcttttatggtaaaagacaagccttataagttgattttattatgccctctgcattaaaataaaacatctcctcctccatgtctgacactcaccctcacctatagcctccctctgtggtttgagctatttttttgggagtggggataaactaactgcatgctgagccagttacatgagaatccagattcctctatctcagaggtagatatttgagagataggtggtagggggttaagatagtattacactggcttgagaaaccacaacagaacataagagaactctggataaccctttttgacagaatggacaaacggtgatttgtaaaaatgcttgtaaggacatttcctttaataatgtatttaataagactgtcttagatcagggaataaagtatctgcaactgtaactaatcacttaaaagctgtcactaaagggtttcaatttgaggttaaattttcagaaactctgtaactagcatgcatcaaattgacttcaatgctgcacctttgagcaaagtttgttgttcagtaaaattttcaaagtcgttttggtcaattacctttaaaaagcttgtttcatggagaatttaatattattcttttcttttagttatattctcatattttaaatatatgagttgcatatgaatgtgatgtcacaaaattagttctataatatatagccatctgctggtaagccagctctccaaataaaacacgttttctgccagacattgttcgttgtatctaagtgttgccaaattctctatacaaaaatttgctcttctagatttttccaaaacattccaatgcttgacttaatgtaggtgattacattttttcacttctcatctgaatattttggccttatgtagagacttccttgagtatatgataaacacctgaaacaaactataacggctatagtttgtatatttaataaatcacaaaaatgtggatcccttttccaaagagacttgcaagtcctgtgcaatgaaatcagctctttataaaacgtcagcattgattcgcccattgcctacattatagcttctaaaagaatattctgaatctttgaatgtagtgaagcattcactaagtttattaacttaggagaggaaaagagttgttcacaaaaataagtaacaagggaagagttactgagtgagcaccctaatgagtaaccaaaaaggctctttatgtaacttcactttcccaaagcttgtatgcaccatttttcatttttaaaaaatactgagagcctttggcaagtaattagtacatcatgacaagaataaatacaatacaaagctgactatcgactgagcaggaaatgaacagaactgagtaaatataaatgaagagctacccttgtgtaaagattttattccagcaagcagctgaacaaggacttcttgtgctctagcacaatagttgtccctgtccatttctcttcttttcagtttagagcttaattttttttattttgattacaaagtcaaaatcacattcaccaaaactgcatctcacaaatgcttcctcttaatagctgtttgtattttatactttatattaatgtatgttgtaaaatcaaagatacaacaaacctgttttattctagactaaaggtaaaataatttgaagtgaaaagaataaaagcattgataaaattacaccccaattgtctcattagccatctcactcagtgtaattatagaatatatcctatgtacaagtctatatcattcactgtttcaagatgctcataattcaacttttagtagtatactaaacttaattaacatcattcatttaattatttgaaattcatcttatatgtaactgacaggcgaatgtgaaattctgagtaatttagtttgatcaattagacagacattaatttgtgtgactagagtaacctttcattatctatctcaaaatatcatgtacacaagtatatacaataattttttaagcccagtatgtgttaaaataaatctaggtgtgaaacattgattgtttacagataggttcaatattgttagaaaatcagtcaccctgctatacctagcacaagtgttatagcatcttgggcaatttttagatacttacattggttggttctcattccagattgacagtgtgttctaattgtagccctagaagaaatctagaggtcaaacctatcacaattagggcaccaacatgtaccctagagttaactaggcagagcccctcaggggcccaggccctgtcttctttacatttgtactctggcatttagcacagagcctggaacctagtggatgatgatggtcatgatcatgatgatattaatcattactgaactaaactgaggggccgaggactgattagaaagtaaggactatgcattatttttcccttgctttaaaattattgattttgctgataattttgagcaggtactttgtcttacttattaccaaaaaaaaaaaaaaaaagtacttttaccaaaaaagtcttatttactttcatcgcctttggaatagatacatcactacaatggattggaagtttgtgtcctccaaaaattcacatactgaaatctaacctccagtgtgatggcattagcaggtggggcctttgggagatttttttttattatactttaagttttagggtacatgtgcacattgtgcaggttagttacatatgtatacatgtgccatgctggtgcgctgcacccactaactcgtcatctagcattaggtatatctcccaatgctatccctcccccctcctttgggagatttttaggtaatgaggatggagccctcatgatgagattagtgcccttataaaagggaccctctcactcaccctctttctaccatgtgaggatacaaggagaagatggcagtctacaacctggaagagaccctgcaccagaacccaaccatgctggcaccctgattttaaacttccagcctccagaactgtgaggaagaagtgtccgttgtttataagccactcaatccagggtactttgttaacagcaacccaaactaagaaaatcaccaatttctatcttactcacatgtgttaccagaactcaagcacacttaagatctatcttatctaaagtagaacataaaggaaagaggctgtattaattgcaacatgactgggaaagaaaatacttaaccaaaatgtgaacatgtattcccacaggctatcagagcatttgttaggagccagaaattttacaaatattttccagtcttcataacccatcaaaaaggataaagttatctctagaaaaaggattatattatcttaaattataaatgaaaaaactgaggttaaagggacttcaagaaaccttcccaagttcccacagttagcaaatgatacaaccaccaagatattttcaactctgaccctgaagttcaagtgctttctcccactatctagcagaaaaaagtatcgttaaccatatagtctcacaaatactgaattacaaatggcgatgagtgctgtcaaaaaaccaacaacaaacaaacaggtatcacaatcagagatcaagaagggtgtaagatgatatttgatctgacatctgaagaatgagcacacatttacccagaaaaataaagggaggaagaacttcaaaagttatctcctaccctgcaaagaatataatgttttgcccttaggggagcttgtgaaggcagtggaaagaatatcattttctactatagaaaccccatgtgatgttttaacagttgaaacagtggaagctgcctgtccagaaacatcatttttcaactttatgaggccatgtagcaagaagcattgaagaagggctgtcatgcttgattcaaggtagatggtgcagctcatcaactagccatgctaatttcagttaatagacaagttctgacctgagagggcaactctccttatcagtcctgtttgtgctttgttaccaaagctcttttgtaatctttcacagataatgcttcctgcttattagtggagactttctccataaactttttttcttttatagactagaattatgttataacttacaggaagtgacttaagcttttatcatttctcagctcttgacagttttattatcaaagtgaaagtacagcctagagtaaatattagttattagtgtcaagctatcctttggggtgtgttgggggaagacacaacaaagtccactttatgctagcgcaaagttcacaaactcagatgcctatagtagccagataagtagttcagtgaacaaaattggtccagtaagaactgatcatcagaaagcagaaaagggcagctaagatccagatccaacaaaattctgtgcaggagtttggtcctgttgttaaccagatctccaggtttttgttttttaaagagaaaccagtaatccaaattcttatataatttctccggatgtttaatgttggcatttaatctattttaacattacgcaatcataacaacacacagccatgagctttgacttgttgacctaggctgtagcccataggaccttaaattttaggagtttaataaatattcactgagcatcttcttcatgttcatgttccatgcttctctaggtacctatggaaggcaccagagacactaagacaaatacaatccagcacttttccttgaggaactcacacttgggtgaccaaaatgtgcaggacacaaatacttatgatctagtagaagaaaatgaattagtcacataatctcacaggcatttaattacaaattgtgatgggtgctgtaaaagaaaaaaatgtgtatcagaattggagataaaggtagaagtgaacagatattcaaggtgatgtctgaatgatgagcacatatttatcaaaaggaagacgggaggaagagcactctaggcagagggaatggcatctgcaaagaccctgaggtaggacagaacttggatgtctggggaactgacaggggacccaagggacaaggagcccatagtaaacaagagaaaagacgtatgataagactgaagagagaagtagaggtaaatcatacatggacttgtggtccacgttaaggactttatgcaagaagtaaatctagatatacctactcaacttatggtttccatgctcagaacctcatgagatacattgcacgttactgtagtacctgaatccttcattgctattgaatggatgtgccttattttccactcccacctggagaatccaaacatatgctgatgccatgcaaactcatgcaaagcgttttgagtggaatagattttccacagttgggatggggaaaggtacaattaaagaagggaagctgacattgctgtaatgtaaaaaaatattttatatggaaatttagcatctcagactttggcttcagaacataaggaaccagatttaccctttttctcaacaactagacaggcagacaaaacatataaaacagaagttttcagacatcgaatgacagacaactcaagacagtaaaagaagagtaacaaaccagatgtgccctatgagcacctaagcttactgcttgaagagtgtttccagggaacagcacaagcagggagaacccagacagagtctctatgggttgaggaaatagagtttggacttcggagaagctcaaatggctagaatttgtgattttagggcagagtcctgcagaggacagtataatcacagagaaagagctctagagaatctacagagaggttttgtcaagttgaatactgatctgcacatacatgtgaggaaagtactgagggtaagaaaaatgtcacttgaaaggaacaggtggaacagtccctggaccttactcagggccggtaatcgtttatgttcctaccatcaaacatagaaagacctcctaataaatgagcactggatagaattgtcagaaggatttagaaacagtgggtggataaaattagactacaggctgctgaggaggcaacagaataaaaaacaagatttgatttcaagtatcttaactgtgaataaaactcaatactagttaacaagaatgcaacaaacaacaatgtaaattcacaatgttaataaaaataaacaagcattagaagaagcagaaagagatgactcataaccaagaaaaaactcaacagattgagaagtgaaagagagaatagaagcagcaggcagagacagtaagacagctatcataaatcttctcaatatgttccagaaagcagagaaaagcatgagcatgatgaagatagagaatataaatatgcatacacagaacttctgtagatgaatacaattgttgacatgaaaagtaaaaaataaagcatagaaaagaaaggtaaaaaataaaggataaaaaaatatattataaactgaaggataccactaatacaacaaacactggatgaaattaatagcacattagacactgtgaaaggaaatagtagaaaatattaatacattgcaatagaaactgcaaagtgaaatacagagattaaaaaggctgaagaaagtgaacagagcatcagtgaactgtgggaccatatcaagtgatctaacatatgtgtaattggatcccagaagtagcaggaacagaaaaagtatttgaagaaataatgactgaaaaattcccaaatgtaatgtaaactacaaaccaacagattcaagatgtttgacaaaactaagaagaaggaacatgaagaaaaccacaccaagccacatcactatcaagttgctggaaaccagtgataaagagaaaatattggaagcagtgagagataaaaacacacaccacatacaggggaacaaaaccaagaaatgatagcagacttatcgttagaaactatgcacaccagaagacaattagggacatctttaaagtgttgggagggtagaagataggggaatctgtctgtttagtattctataccaagtcaaaaagtcttttttaaatgaaggcaaaataaagagtgttttagacatacaaatgcagaaagaatttctcactaacagagcagaaaaaaatgttaaaggaactcctttagatagaagaaatattatgtcagagagacatttagattcataagaaggaatgaaaagttccagaagttgataaatatagagaaattttttcctcgttttaatctattaaaaaggcaattgattatctaaatgttaaagcaaaatagtaacaatttattgtggggtatattatgtatatataaataaaatgtatgacaatagcacaaaggctgggagggaagaaatggaaatatattattgcaaggttcttacaagtgaaatagtataatattatttgaaggaagtttgtgacaagttaaaaatgtactatatattgtaaacggaagggcaccactaagaaaacaaagctaagaaggcaacaatggagattaaacatcactaactatactcaatccaaaagaaaacagaaaggaaggggaaaaggaataaagaccagatagacaaatagaaaataaatataaagatggcagttttaaattcaaccatatcatcaattacattaaaagtaaatggaaagaacactacaattaagaaacaaataagattgaataaaaaagcaatgctaaactgtatgcagaatttaagaaatccactttaatgagagagacaaagataggtaaaaaataaaggatagaaaattatataccataccagctaacactaatccaacacaaaagggtgtgtaatgatgattccattgatatgacattacagaaaagccaaattatagtgaaataaagcagattagtggttgtctgggcccagagggcattggctacaaatggcatgaagaaatgttttggaatgatggaactcttctctatcttgattggaactatagctataagactgggtaattgttttaatcaaagctcagcaaatattatacttaaaagtggtaaatgttattatatgcaaattatacctcaatgaggataatgaaaggaagaaagagagggaaggagggtggggaatagggaaggaagaagacaaagaaaggaagaaaggagaaaagaaaagaaactaggaaaggaaaaagaaaagaaagggaagagaaaggaaggggagggaaaggattaatcatttcagttttcaaaaagtgtagttgcttcagtaagaggagttttattggccttttaccccatcatgtaaaacatttcaggcttttttccccagatccttgttgtctgcctacatccacactgatgttctcaccttcttctcgtaaagaatttatcaagttattgtaccaaacaaaaataactgcatcccaaagagaaattctgtcaccagctgatgatagggaatctttcacctaattaaatgaggaattcctcaggcagaggaaactgttcattccacttggctctctatggcactcacctctccccttcctgacctcacttgctccattttattattgaaaacctcacccaaccctctacacttcttttaatattgagtatctcagttccttctcttcaataaagaagaccaatttcttcatcctctccctctcctatcagtagggaaagtccaatatacatggaggtgttaatgatgtgtctttgggtgcacaaagtacaaagtaagacatctaagtttcaggggatggacacatttcatattcatacagacaaccagcctgcataggggagttagacgctgtggctcgggggaaaaaattgagataatcagatggctaagatgaaataaagagataaaacaaagctgaggatcacagcagttggaaagaagatctgaaatagcaaaacaaaataatacataaacagctctgactatcctcccatctcatgttaataggctaagtatgtcttattaaacaccacaaagaagatatcacccattcttatattctgagatggtttactaatcaaaggcgattcaattctctgattatatttaaataataattgttcaggtaccctggaaaattaacttgctaaactttaatttacaaataacatttgttattcttaagatcaccatgttatcaaagcctttgtaagtacatgagcatagaaatgggcatatgtgaatctttccaaataataaaagttcactattgaaggacatatgcatctccagagaactcatcttagctatccccagatttgagagtggtgaaaacgcaatcctcagaaactgcccacatgtcttgatggctgttactcctccaggtgcttcttaccttgaccacacattccctgcggagaagatggacgacgctgtggctccaggccgagaatacacctatgaatggagtatcagtgaggacagtggacccacccatgatgaccctccatgcctcacacacatctattactcccatgaaaatctgatcgaggatttcaactcggggctgattgggcccctgcttatctgtaaaaaaggtaagaacacccccaccaaaagattcaacaactaaatgttggaatggtcaggagttctgtcatgggacaaagcttgggagcatcttggtaacttcttgtacatcaagcagaggaagacggcacggagaccagatcattgtttgacaagagaaaaaaacacctgctatttcagggtgtggatccacctctgtttcttctcattcctccttcatctcagtccttaaggttctcccaggcaaattcctgtttgagagtatgttctgatgtcatgcttgtatgatctgtaacatttacctcaaggccaaagtcttttagaaagtatacagtagcctatactctgctgaaagagctcttggaaagaactttggctaacatgtttgacatatctgaggtttgggctggtaatttgctctataaacacgtgaaatgccagcttcctttcttacaaacaagttgaaaactttgggtggtaggtttcaaacacactcaagtgactttacaagaacttttattggctgggcttcttaggagcaagcttggattttcattttatcccatgagaatccagcccatctttcattaaaacaaacaaccacagtgagccacagcatgggaaataacgtgatggactcaccatctgcctatacatacacgctcaggccatacctacatacatgcccaatgtatttactcattatacaaagactttttttccatttcctggtatatataagatactgtgatggtactgaaaaaaaccttaaaacttacaaaagactcttcttgcattttaccatcagcagcatgtttttctcatagtgagaatggattaatgctgatacttccacccaattatctaatgccccctttcatatacaaataagatgacagcattaaacttggggcatgatgcttttaccaactgagctaacgtatctatatactcttctattgagactgggggaaatggatacttgtacagagtcttgagagtcaccaaatgttttcttcccaagctggatgaaataaagcctgttccccaaagcaagaaggtatcaaagaagacagtgtggcaccagattttaaataaccctagaaccattattacttgataaatatgctattttaaaaaataagaatttcttcaagttgaaatcattatggttgattgcttgccctaaactctttgctatccaggaaagctaatgagcgtcttctatctgcagtgctactgaaaacatgtctttcctttcatagggaccctaactgagggtgggacacagaagacgtttgacaagcaaatcgtgctactatttgctgtgtttgatgaaagcaagagctggagccagtcatcatccctaatgtacacagtcaatggatatgtgaatgggacaatgccaggtaacacgagggctgtgtaccattaaacaacagtaaaatcattagtaatttttcggtcctgttttcttcaaagcactagagaagttgaccatactcactgttttgcaactccctatcaagaaggaaatattttctctttttttttttaaacaggaaatagaagagacaaattagaagctagagaagaaatgtgcagccttgttaggtatagtgacctgagtaggtttcaccttggcctgtactttgaataagaccttaaggtatcagctcagccactctctccgagttctgcagttcctctatatgatgaccatggcttcttcaaggacaagccctagcaggaaggatcagcaggaagattgcagtaaagatgaacagattaggagtaatcctcaacacacaaaaaaaaccagcatttcaaaaggtgacagaagagtaatattcagtggcatctagaatattttctctttccatttgcatttgggcacttatgagaaggcaaaatcatagcaatcgttaagagaaaaaataactaattcccacttagaccacatctcttctatttctctctggtagaactgacctacaactaaagatccagggtatatgatactagcctgagggaaaaacattaaaaaattaaaatgccactttactaaataaaccatatttcaaaacactaaacttcttagaggttattctctaatgccatctgaaaatcacaaatagcttcacttactaaaacacaaatattgttaagagttgagatctgggtagtgtttttaaattgtattctatttcatttgactacattttccacttggttttctgaaaatatactcatatgactctcaatgttgatcccaagttccaatactaggagcttgtaaaaactggggcttagttaactgacctcgaccttagataatctgagttcagacttcagattatcagactaccttctgtggccctggataaattagttgtctcaatgtgcttacttacaaaagtggactaaccatttatcctaacatctatttcctggcagagtgaacaatctgtataagtatatggatgccaagaaaagcaaaaccatatgcacaaaaataaaaataaattgatctgagcttagagtttacgaatttatagttcccaaaagaataattgggggtaaatgggacaaggtagggaaagaccatcagtagaaactaagaatagtaaacatttgtaaaaaccctctgccttataaagcagaataaattgaatacatatgataaatgctaacacagatatgttaattgctgaactcaatataagcatttctttggcatggataaacgcttccaccaaagcctcctagtgatgcaaggaatcctggctttgttgcaatggtctcctaaaaaaaacaagcctttgtgtgggtaaggaactgattctcagccccattatctagtatctagtgattatgtatctgagatgtaaaacagaaacctaaaagccaaggatggagtctccccacagagcaaatgagcattttcccagtgactgtaggagcaaagaaggagcaaaactaagtttttatattcagttatcactactccttccatgaaaagctcccaatggctcagcataatgaggacttgtacactgcattttaaggagagtgtgtaaccccaaagtgatttcgttgacttgtcattaaaacaatcaaaaagtaagtaaaaataacaattgaaaatcctcacatcatcttcacatcttcttcccttaggcagagcttcgaccactagagctagagagctgagaggattaagtgcttgaactcagccctattggcggttctggtgatttgactccctccagctgagatcagactggggtgaccaaacattccattttgccgtggactttttaccagttctaatagttaaagtcctgaatcttgggaaacccctcagaccagaacagtcggttaccttcttggttcccttcttggcctaatcctttagcaatccctgtgtttttgagttcacatccaccatctctaagctctgttgttacctgtataatgccatttatcacaatgagttgtcactgcttgtttgctggtcactcagatgtctgcttttgcagggcacaaactacaactggagtgtctgttccctcaaagctttatacaatgcctgacacacagcaggtgctcaatacacttggtgagtgaatgtttgatcacagagtacttgactgaatgcttattttggcctgtgtctctccctctttctcagatataacagtttgtgcccatgaccacatcagctggcatctgctgggaatgagctcggggccagaattattctccattcatttcaacggccaggtcctggagcagaaccatcataaggtctcagccatcacccttgtcagtgctacatccactaccgcaaatatgactgtgggcccagagggaaagtggatcatatcttctctcaccccaaaacatttgcaaggcaagaaactctcctgacagtcttgcttctcaatgcagaatcctttcttcccatgcactaactccctctttctcccttgccctttcaagccacctgcaccgcagacaaactttcctcagttcctaacaaccaaacttagatattttgctcttagatttataacttgctctttggggatggagaaagcgaaggaattggcaaaggttttttttttttttttttttttttttttaattaagcaaaagctaaagagatctctaacttcctcgaaagaagaaaagaggaagaaaacaaatgcatacatagagatattctttcttcgggttacttcatatgcaaaaaagacctagatgctagcacaagacaaactgcaaatttacagaagcactaagttgtagaaagtgtaaaagtttagcatgaaaacattaacctttacagtgggatgaacacaaagtctagcacagagaggaactcaatgaatgtgtgttgaatggatcatacatggcatatactgaggggtgagctccaaagaacactggggaattcaggtgggaaaataaatcaacccacgttatgtggtatcgtgtaaacaaaataactgattgttctactacacatttttgctttaaaactgttgagattagagttcatataaatggagactaaaatctaaggaaatgatatcacaataggaaatcattttgttaccaaaataatgtataagcaacacatataaggaagagatacttcatgagatcatttctgtttcttttcacacgagtagtcaaaattatatttgaagtaataaaaccatcatgatatccgtggaagatagagttcccaataatattaaaacaacaatgtaacttttgtttctttgttgaggataagtgcattatgtattgttattaatatttaatttttaacaacaattttattaggtactggtgctacttcattttatagattaagggacagatgacagaaaaatgagaatttaacaagacttaattcataaggtcttaagaagttaaaaattattagaaatttgcctgctcaagaagaaataaagggaatctttccaaattttttccctaacccctcctccttttcccccttttaaaattcttgccttttctggatgccacttaaagagttccaaactaaaatgttcaaaaattgcctgagcattactttcactcttattatattaatataaaccttccacaagttgatttaaaggatatgcatttcaatcaaccataatttcttctcttgagttatttcattgtctttctgtcctaactcagctgggatgcaggcttacattgacattaaaaactgcccaaagaaaaccaggaatcttaagaaaataactcgtgagcagaggcggcacatgaagaggtgggaatacttcattgctgcagaggaagtcatttgggactatgcacctgtaataccagcgaatatggacaagtgagttgttggggttcataccactgggcaaaggttcaagacacattccatagggtcctagatgtttggggtgaaatgtaagttcacagctctcaaggggacacatgtattggtttctattcaagtctttttgtaaaaattaatcttgaattacccccaaatcaccaaagaaattcagcctaataataataaaaatgacaacagcagctaccttttgttgaatgtttgccattgccaagcactgtattgtccctttctgagagcttcgcttcaactctacaaactagatactgctcttatttctttttatagatgaggaaatgggtctgagagattaagagatttggaaattcaaatagctcttaaacccttgaaaagttactcaaattcactcataataacagaaatgcaaattaaacttcatgggaatactacttttatctatcacattcacaagtccagatgacatcatctgttgacaaggctgtgagaaaaaagaactatcatatattgttcgtggaagattaaattggtaaaaggattctgaagaataacttggcaatatgtatcaaaattctaaatgcatataccctttgactcagctatctcactctggaaatctaactatacagatacacttgttcacaggtgaaatgatgtatgtacaacatattcactgttgcaacgttagtagtagtaagactggaaacaacccaaaatgtccatcagtagaaaactagtttaataaattaggatacattcatacaatggaatactaagcatcaaaaaaagaggatgcaaacactctgtatgtactaatacaaaaagttctccaagatatgttattaaattaaaaagctgggatgtagtatagcgtgtatacatagctgccttttgttaaaggagtgaaagggataagaatatttatattttcttatttgtaagacataaaggtattctggaattacacgcatgaaattaatatatggctacctagaaaattcagggagggtagggaggtcattttgagagtcatcagagaaaagtgagagttttcactgtaataaaaattatgtgaatgtattttctattaaaaacaattaaactaggaaaaagaacaaaaaaaatttggccaagattatagaattgttgacagaactgagataggaatccaggagtgtttggcaacagtcagtgctttccactgggaaaaataaattcataaaatgatattccatcttaaaagattgctgggttaaatgatatttctgactttaggtcttggaggaactgccatactgtcttccacaatggctgaattaatttacattccaccaagagtgtataagtgttcctttctctccatgaccttgccagcatctcttctttcttgacttttcaatcatcgccattctgactggcatgagagggcatctcattgcgtttttctttctttttttgagacggagtctcgctctgtcgcccaggctggagtgcagtggcgcaatctctgctcactgcaagctccgcctcccaggctcacgccattctcctgcctcagcctcccgagtagctgagactacaggggcccgccaacacaaatacaaaatacaaaaaatataattttttgtatttttagtagagatggggtttcaccgtgttagccaggatggtctcgatctcctgacctcgtgatttgcccgcctcggcctcccaaagtgctgagagtacaggcgtgagccaccgcgcccggcctcattgtggttttgatttgcatttctctcatgaacactgatgttgagctttttaaaatgtgctttttggccgcatgtagttgcttttgcaaactaaggtaataaagagggcaggggaaaagtggttcatgtttctgctcccaaagtatttatcccagtagctacaaaagatgggtgaaggaggttgcttttcagtcagctcagagaattggctagatggtggaagagatagcccaatagcacagaactatgattaacaatgctagtaaatgtttcctggggttggaagttgcttttagggattaagaaatacctttaaaaccaaaaaggctatcatagaataagtgataggacagactttagaaaaattcctagtatcttttcagccagtataggccttttcccagagatatcaaatgtctgctgtagcaataagaatgacaggaagatctaagtagctgcttctaaccagttacctatgacttttatcagtgatgcaggagacaaatcagaagtttccagttttccaactagacagaaaacataaggactttgcaaactacactaagaaatttttagagaactagtatgttagctaatctaagagcagaatgtttaagcacaagggtttccccatcctaccgagatctctatttgagaaagtggtttaatttttttttacttcactttaagaaaatacaggtctcagcatttggataatttctcaaaccaaattggaaaacattataagaaagttatgtacacacagtacgaagatgagtccttcaccaaacatacagtgaatcccaatatgaaagaagatgggattttgggtcctattatcagagcccaggtcagagacacactcaaagtaagtaacacaaatacagaatcatgggagaaattacatagtaaaatattatggagtacctggttattttttaattttaaaagaaaaagatgctcatataattttaaattcaaatgcaacttttagtttttatttagtatttgtatttatttacagcttactcagtaatacaaaggatctgagacagtttctcaagttataaaggcataaaacaaggagtctatgtaattgggatagaatatgcggacaaagaaaataaagccacagataagtagataccatgtgaccctgtaaggctgtcttcaaattttgtcctaagctttatggcagtcagtgtaaaaaaggaaatatgtcagggtgaagtttacatcatctacaaaaagaaagcaccatttatcctgatgttaagatctaagaggaacttctttaatgagttctacaaaagagagtgctgagtgatacagtagatggcatccttgataaaattcttataaccagcataatagattaaaagttgcataaaataatagattaaaagttgcattaaaatatttctcattatagctaagatataacagtaaacacaattgaatagaaacaatttttactcattttttaatgtagtctaggtatgcagctctctaatggttggactctgatgaaggtaaactccatgtatcaagagcacggagttttcctcagacaattctccttaaatgtcatgtcacttcaccaagatagataagaattggacagcagagaattaaaggttgcaatctttgacaaaatcctagagtgtagttaatctacagacaaaggatgatccaaaggctttgacaatcaaccaaatagaagataggattaaggttctcttttgcagattaaagagcctaactaggactcctgtgtgttttatgcacctgacaaggtctattctgttcatttaaaatagccaaaggacaaaagcagttttttttctccatgcctctttcccttcttccatttctgatcccttttatgtgctctcagcaagtgtagacataccttattaaaagttcaggatctggctatttgtctgtgcctctcaagcaagtagcttttcccccccaccaagggtcttactctgtcacccaggctggagtgcagtggtgtgatcatggctcactgcaacctccacttcctgggctcaggcgattctcgcacctcagcctctcaagtagctgggactacaggcacacgccccaacgcctggctaatttttgtatttttttgtagagatgaggtttcaccatgttgcccaggctggtcttgaactcctgagctcaagtgatccacctgcttcagcctcccaaagtgctggggttacaggtttgagccactgaacctagctgagaagatgacttcaaagacagtgtcctaaaaaatctaccgggcaggggaaggggatcatggtctagagatgagaagcagattcaaaatgagatgtggcccaagctgaaaagagaagggcaggggaaggaggacttgcttggagagagtgatactgtgaggaaaacgtcacttctcctaacctatcctctaaagtcagacttctctttccattttccaccttaatgtgtgagtgaaacactctctccaatgctcctgccaagtgatgaggggaggttactgctcagataaacagatctaattttcctactgtgtgtacacatgtatacacacacaccatccaaaaggtgaatatgcaaagctagtatcttatattatttgtcatgatcaaccttaaatcctagaataaatttgatttaactttgtagatcgtgttcaaaaatatggccagccgcccctatagcatttaccctcatggagtgaccttctcgccttatgaagatgaagtcaactcttctttcacctcaggtttgaatctttcacttctactgaatccaactagtaacttctgagaggctgccacatttttctgctattctccttgcccggtggtgtcactactgcagtcaggtagtatacatgtaggagtatcctaaaaatcacagccaaacccttctcacttcaggagttttgtctcttagtggtaacaaaatatggtgtcttttattagtgtcatagtggcctctagtggagcattatctaatggctacatgttatccaggttccaagtagaatatttaaagaattcaattgaacaatgagaacatttagacacaggatggggaacatcacacaccggggcctgtcggggggggggggtggggggcggggggagggatagcattaggagatatacctaatgttaatgacaagttaatgggtgcagcacaccaacatgacacatgtatacatatgtaacaaacctgcacgttgtgcacatgtaccctagaacttaaagtataatttaaaaaaaataaaaataaaagaattccttttgcaatattaattggttccagcgaaagcttatttatttatttattatcatgaaataactttgcaaatgaaaacaattttgaatatattttctttcaggcaggaacaacaccatgatcagagcagttcaaccaggggaaacctatacttataagtggaacatcttagagtttgatgaacccacagaaaatgatgcccagtgcttaacaagaccatactacagtgacgtggacatcatgagagacatcgcctctgggctaataggactacttctaatctgtaagagcagatccctggacaggcgaggaatacaggtattttgtccttgaagtaacctttcagaaattctgagaatttcttctggctagaacatgttaggtctcctggctaaataatggggcatttccttcaagagaacagtaattgtcaagtagtcctttttagcaccagtgtgataacatttattcttttttttttttgtcttgtctatttttatcagtaccatcactgccgaaggcaagtctagagtgtgataacatattttgtcttagtttcaaattccaggtctgttggtatcggatgtgttgagcaagttgattagcctttcctaatttcttccttttatcaaatgggtaataaccctcctaaaaatgttacaggtctgtttgggggttcagtgagataccatctggtaaaagtataaagctctttaccagtctttgctatttttagagacctgcaatagggagacagaggagagattctctgaaagcaaccaaatttagagacatagttcctagtgaaattggacccagattatggcccatctctgttgagactaaagtatacagaagaatgtgaacaaagatactgaatttctgagtttgtcttcattgaagaattgtagtctcatattattaaactaaaattcccaattatgctaaactgtaaccaaagaggtcttatctcaaggcatacaaaataaacatatgcctagaaaaagcagaaatgaatttctggacatatggaagatcctgatttattgagctaggaaaggaaacaggtagtagaagcataaggcttttctattgcaaccttctctttcatcctttgcacttattcagagcatattcagtcaatcattcatgttgaaaggtgtgcaattacagagatagacagactttcagctgccatagcgaaatgagatttttcttttgggatttgttttttttttttttttcttttgagacagagtctcactctgtcacccaggctggagagcagtggcaccattttagatcactgcaacctctgcctcctgggttcaagtgattctcctgcctcagtctcttgagtagctgggattacaggcgcccgccaccacccccatgtaatttttgtattttttagtagagacagggtttcaccatgttggctaggctggtctcgaactcctgacctaaggtgttccacctgcctcagcctcccaaagtgctggtattacaggtgtgagccactgtgcccggctcttttgggatattttaatctctgaattttcttatctgttctgtttgcttttgcatattacctttagctctaacaagtgctgtgtacacaatggactctcataaatgcctgaattatatggcttcagtagttccaagaactatgtcactttggtttctgagaactcagtggtgtagataatttgctgcaatgttaatgactgaatacagcacttttttttcttttttttttactcttaagttcaggggtacttatgtgcaggatgtgcaggtttgttacataggtaaacatgtgtcatggaggtctgttgtacttactacttcatcacccaggtattaagcctagtatccattagttattttttctgatcctctccctctttccaccctccatcctctgataggccccagtatgtattgttcccttctatgtgtccatgtgttctcataatttagctttcacttgtaagtgaaaacatgcagtatgtggttttctgttcttgcgttaacttgcttagaataatggcctccagctccatccatgtccctgcaaaggacataatcttgttctttttgatggtcacatagtattctatggtgtatatgtaccatattttcttcatccagtctgtcattgatgggcatttgggttgatttcatgtctttgctattgtgaagagtgcgaaaatgaacatacgcatgcatgtgtctttataacagaatgatttatattcctttgggtacataccaagtaatggaattgctgggttcaaaggtatttctgactttaggtctttgaggactcaccatggtatcttccacaatggttgaactaatttacactcccaccaagagtgtataagtgttcctttttctccacaaccttgccaacatctgttagtttttgactttttaataatagccattcttattggtgcgagatggtatctcattgtggttttgatttgcatttctctaatgatcagtgatgttgagcgtttttttcatatgctctttggccacatgtgtgtcttcttttgaaaagtgtctgttcctgtccttggcctactttttaatggggctgtttgtttttttcttgtaaatttaagttccttataaatgctccatattagacctttgccagatgcatagtttgcaaaaattttctcccattctgaatgttgtctgtttactctcttgatagtttcttttgctgtgcaggagctctttatttcaattaaatcccatttgacaatttttgcttttgttgctattgcttttggcatgttcgtcatgaaagctttgcccatccctatgtcccaaataatattgcctaggttgtcttccagggtttttgtagtttggggttttacgtttaagtgtgttgttgttgttttttgtttgtttgtttctgttatttttgagatggagtctcgttctgttgcccaggctggagtgcagtggtacgatctcagctcactgcaacctctgcctcccatgttcaggtgattctcctgcctcggcccctcggcctcccgagtagctgggattacaggcataagccacgatgcctggctaattttcttttcttttcttttcttttcttttttttttttttttagtagagacgggttttgccatgttgaccagactggtcttcaactcctgacctcaggtgatccacccgccttggcctcccaaagtgctggtattacaggcgtgagccaccgcgccaggcctacatttaagtctttaatccatcttgagttaatttttgtatatgatgtaagaaaggggtccagtttcaattttctgcctacggctagccagttttcccagaaccatttatggaatagagaatcctttccctattgcttgcttttgtcacagatcagatagttgtaggtgcgcagccttatttctgagttctctattctgttccattggtctatgcgtctgttcttgtaccagtactatactgttttgtcctccagagggcagcagacatcgaacagcaggctgtgtttgctgtgtttgatgagaacaaaagctggtaccttgaggacaacatcaacaagttttgtgaaaatcctgatgaggtgaaacgtgatgaccccaagttttatgaatcaaacatcatgagcagtaagtcagagtactatttttgttcatcagtttttcattcctgtggttgaaatatgactgtgcctagagtcagagacatggattaaaatctactcgctaaggggcacctccaatcctcacttccagtccaaagacttggtgatgaaatccgtgggtgacatcatagcaacatttttaagcaagaggtcaaaggctcacatccttagaaatgcgtttgatcttctattccaagcgtgtgtgtgtgtgtgtgtgtgtgtgtgtacacagacatactctgcgtggtgaggaaaagggtgagagagtaggactaatggaaggtgttatagtccatgtcaatagtatcctagactgagttcagggtgaatatatggctaggacagaaagaaggcaagtaatccaaagatggattgacacatcaaagtagagcaaaatgagtatagggacccaagagtcttggaaaggcatgcatgaagacatttcaagtgatcagtaagattttcagaacaaaaggaattccctgaatgagggttccggcatttgctgcagttctaaagttcagtggccaaaagcactgccatggcagtctgagagaaatgtcactgagccagctggaagcaaacttctccacaacagccagggtccccctactgatcctcagagtctagagtcatggtaatcaccttctctagtaggtaatcacacatgtgaggatgatttctgcatgttctgttcatatagcttcagatgactgacagctagggattatcagagctgacaggtgccaggtcaaataattcaaacagaaaattactctcagctttctttgcataacttccttttggcagtgaatctatcatagttctagaccagtgctgtccaatagaaactacgtatgagctacatgcgtaatttaaaattttctgatagcaacattaaaaagtaaagagaaataggtgacattaattttagtaatatgttttacttaactcagtatatcctgaatattatcatttcaacatgtaaccaatataaaaattaatgagacttactttattactaagtctttgaaattcaatgtatattttatactcacagcatatctcagtccagtctacccatatttcaagtgctcgataaccacttgtagccagtggctaccatattgaacaatgcagttatagaccatttagaaaaacatctagaatgaggtataaactaataatacatcatgtaaattattaaagtcacttaagtgatttaagtaggtatttaaatatttgttaatgccagtcattatactggtactaaggctaagagtggtaatcgaggtagacatgagccctgcccttgtagaaatcatacctttggttttttactatgcttagtacataagtaaataaaaatattgcctacagcagtgtcccttttaacaataatgaaatgtatgaactggatactcaaatggaaactgtgaatactatgtagattataagacagcaataaaaactataaaatatgctaaatgggctttatttttagggacattacttcttacccaatgactaatatatcaaaaagatgaatttcttatattatgcttttcctccaagtggaattattagaatatctttaaaggcagagaatggagcacaaaatatttactatacatttgacgaatgactaaatcaatgtaaatggaaggctttatctttttcctgagatttctcctttggctaatttaggagaataatctctcatttgaaaattctgagtttgatcttctagtcacatgttagactagataaagcttatcttggataatcactgctttgacacaaccaaattaacatggagacatttatcttaggtataattagacacatgcccttttgttggcatagacttggaattttaacagattttacactttcagctatcaatggctatgtgcctgagagcataactactcttggattctgctttgatgacactgtccagtggcacttctgtagtgtggggacccagaatgaaattttgaccatccacttcactgggcactcattcatctatggaaagaggcatgaggacaccttgaccctcttccccatgcgtggagaatctgtgacggtcacaatggataatgttggtgagtaagagtctggacactcacagaggaagcttgctttgaatttctggtctataaaggtctgctgcaactctccaggctaccagtgctcctctatgtatctccctgaccccctgcaggcttttctttcaatgtttctcatgatttctctttgagaaattaatgacttaaatggatccagttctttagtgtgggttatatttttccttctctgggcaaagtaggaagtaaaaatatacaacagcagaaaaataaggcataactctgaggaagaagcataaatattttggccacaaaagagcatttcttttatcaaaatgccctattcggttttttgcaacagtcatcttcaatcatcaggtacagtgccttaaaggctgcttcagcaacagctttggagtttgtcagactggaatgcaagtcctgatctgccaatcgattgctgtgtaaccttacacaagttacttggccacactgagccacaagtcatttatctggaaaacagtgtaatcacatctcacagagttactttgaccattaaaatagtaatatgcgccaagtgcctagcactcagtagacaccaacaatggtaactattggagactcaccaagaaatctttgatgttccagcaatgcatgccatttcagagattcaaaattgtcctcgtgaattattacttagaaacatctaaatgtctcttatttgtggggatagagctcatcaccatccctttaattctaagacaagatgtgctgttaggatatttatgatattaaaagtccattttattcttgattcatccctttcttaatatattttaaaatagtgagcaactatctgtgctgaaagaccttttttcccctctaatctccactaagcaacacttttgttttttattctgttaagcgagatgaacgcactggtcatgtgcttagagtcacagcaatgtcaaattgctttagaaaaacaaaagtttactaaatatttcattctcatttttctctccttgtgttattttgacccagtaatcaataggtcacagacaagcagtggtccacagcccatacttgaatattcctgacgaaagtttattagaaattacctgccacaatggattattgtgttttcatgtcttttcccagacttccagatctctcttctgtctgtctctcttctgtaggaacttggatgttaacttccatgaattctagtccaagaagcaaaaagctgaggctgaaattcagggatgttaaatgtatcccagatgatgatgaagactcatatgagatttttgaacctccagaatctacagtcatggctacacggaaaatgcatgatcgtttagaacctgaagatgaagagagtgatgctgactatgattaccagaacagactggctgcagcattaggaatcaggtcattccgaaactcatcattgaatcaggaagaagaagagttcaatcttactgccctagctctggagaatggcactgaattcgtttcttcaaacacagatataattgttggttcaaattattcttccccaagtaatattagtaagttcactgtcaataaccttgcagaacctcagaaagccccttctcaccaacaagccaccacagctggttccccactgagacacctcattggcaagaactcagttctcaattcttccacagcagagcattccagcccatattctgaagaccctatagaggatcctctacagccagatgtcacagggatacgtctactttcacttggtgctggagaattcaaaagtcaagaacatgctaagcataagggacccaaggtagaaagagatcaagcagcaaagcacaggttctcctggatgaaattactagcacataaagttgggagacacctaagccaagacactggttctccttccggaatgaggccctgggaggaccttcctagccaagacactggttctccttccagaatgaggccctggaaggaccctcctagtgatctgttactcttaaaacaaagtaactcatctaagattttggttgggagatggcatttggcttctgagaaaggtagctatgaaataatccaagatactgatgaagacacagctgttaacaattggctgatcagcccccagaatgcctcacgtgcttggggagaaagcacccctcttgccaacaagcctggaaagcagagtggccacccaaagtttcctagagttagacataaatctctacaagtaagacaggatggaggaaagagtagactgaagaaaagccagtttctcattaagacacgaaaaaagaaaaaagagaagcacacacaccatgctcctttatctccgaggacctttcaccctctaagaagtgaagcctacaacacattttcagaaagaagacttaagcattcgttggtgcttcataaatccaatgaaacatctcttcccacagacctcaatcagacattgccctctatggattttggctggatagcctcacttcctgaccataatcagaattcctcaaatgacactggtcaggcaagctgtcctccaggtctttatcagacagtgcccccagaggaacactatcaaacattccccattcaagaccctgatcaaatgcactctacttcagaccccagtcacagatcctcttctccagagctcagtgaaatgcttgagtatgaccgaagtcacaagtccttccccacagatataagtcaaatgtccccttcctcagaacatgaagtctggcagacagtcatctctccagacctcagccaggtgaccctctctccagaactcagccagacaaacctctctccagacctcagccacacgactctctctccagaactcattcagagaaacctttccccagccctcggtcagatgcccatttctccagacctcagccatacaaccctttctccagacctcagccatacaaccctttctttagacctcagccagacaaacctctctccagaactcagtcagacaaacctttctccagccctcggtcagatgcccctttctccagacctcagccatacaaccctttctctagacttcagccagacaaacctctctccagaactcagccatatgactctctctccagaactcagtcagacaaacctttccccagccctcggtcagatgcccatttctccagacctcagccatacaaccctttctctagacttcagccagacaaacctctctccagaactcagtcaaacaaacctttccccagccctcggtcagatgcccctttctccagaccccagccatacaactctttctctagacctcagccagacaaacctctctccagaactcagtcagacaaacctttccccagacctcagtgagatgcccctctttgcagatctcagtcaaattccccttaccccagacctcgaccagatgacactttctccagaccttggtgagacagatctttccccaaactttggtcagatgtccctttccccagacctcagccaggtgactctctctccagacatcagtgacaccacccttctcccggatctcagccagatatcacctcctccagaccttgatcagatattctacccttctgaatctagtcagtcattgcttcttcaagaatttaatgagtcttttccttatccagaccttggtcagatgccatctccttcatctcctactctcaatgatacttttctatcaaaggaatttaatccactggttatagtgggcctcagtaaagatggtacagattacattgagatcattccaaaggaagaggtccagagcagtgaagatgactatgctgaaattgattatgtgccctatgatgacccctacaaaactgatgttaggacaaacatcaactcctccagagatcctgacaacattgcagcatggtacctccgcagcaacaatggaaacagaagaaattattacattgctgctgaagaaatatcctgggattattcagaatttgtacaaaggtttggccagttttctccttttttattctcatttttccattactgctgaaaaaagtagctactacaattcagggggataattgtgggcaaattatactaagaacagtgtggttcccctattgcaagttggcctgttctttttcctttgtcaattccaagattgcttctttaccttagatgacccctggacaatataagaacaatcactgtgagaactctataatattctgtaattaagcatttttctgtgtcctctcctcttactacccatgtttctactgactcttattgctccaggcagagcccaacctatccatagctatatgctaatcaatatgatttaattgaagttagcctcaaatccaaactcaaatatgatgtagaaatctcctttttgcatttacttgtttagatcagaatttctaagagatccaaatcccttttttaaaagaatatttacaattcagttttgcttaggggtagaaagccatgttgaactgggctctttgttctgggatgaagatacagaaagagaagagagaggaggaaaggagcaaggcttagtcaactacaaattctcagggatatagcatgatgactgtgcatcagctgtctagatatgcccacagcttttactaaagctgttacactaatcacttaaaaaaccaaagtgtaattacagtaggcaaacacaatgtatggtgtgacttatgcatatgagttcattaatctgatgcctgacatctccacattagaactctgtttaaaacaccttttcctatgacttcctatttaaatgttgcactcaataccacatgagaacaactagctacctgagtatttctaagcaaggccccgagggagtgagatgcagggcctgtccagagtgaatagggatggaaccaccttcaaaatcttgtattccattcaaggctcacaacccacttttatggcattcggagttgctttacccactcccttgtgttctgtgagtttgcatgttatgctcagagtctggaaagatgggattagtaggggaggtagaccagaagaaaggcagaaggagattctctgttgatgactcacagtatatagcaaatattatgggtttgatgggtgagtgtttggcttgtttccacaggcttgggaaatgtgagagtcagtgggagaattcgacatgcttcagtcctagactgagccaatgaactagatggaaataatgtgctttatttatttatttataatttgtaattaaactttttattttggaacaaaaataaaatagattcacatacagtcaagagaaataatacggagagatcctttgggtatcctgagtattctttacccagtttctcccaggggtaacattttgcaaatctataatactatatcacaaccagcacactgatgttgatactgtcaagacacagaatgttcaccatcaccataaaaatccctctcattacccctttatagtcacatctgccttcctcccaccatagcccttccttattccctggcaaccagtagtctgatctccatttctataattttgtcatttcaagaatattacataaatggaatcaggcaacatgtaacctttggggactggtattttttcactcagtataattctctggagattcatctggttattgcatgtattccattatatgggtgtaccccagtttttttgttgttgttgttttatacacatttatggtgtaaacatgatgttttaatatatttataaattgtgaattggctaaatcaagctaattaacctatgcattacctcacatacttttttgtggttagaacacttaaaatgtactcagcaatgttaaaaattcagtgtgttgttattaactacagtcaccatcttatacaacagatcttctaaatttatttcttctaactgaattttatcttttgaccattttctcaatgctccacctctgtatccctttgttaaccactgttctaccttctgcttctatgagctcaatgtttttagtttccacattataagtgagatcctgcagtacttgtctttctgtgcctggcttattttatgtaacataacgacctcctggttcagtcatgttgtcacaaatggcatttcttcgttttcttttttttaaatgctaaatagtatttcattgtttatgtagatcacatttaagaaatccattcatttgtttatagacatttgggttgcttccctatcttggctaatgtggctaatgctgcagtgaacgtgggacagcagatatctcttcaacatactgatttcattttctttgggtatatacccaaaagtgggattgatggatcatgtggtaattctatttttaatttttaaaggaacctcccatactgttttccataatggctgtactaatttacactctcaccaagagtatacaagagttcccttttcttcacatccatgccaacatttatctcttgtcatttttataatagccatcctaacggtgtgaggtgagccctcattgtgattttaaattgcatttctctgattattagtaatgttgagcatcttttcatatatttgttggtcatttgtatgtcttcttttacgaaatgtctattcaagtcttttgctcattttttaatcaggctatttgggttttttgctgaattgagttccttatatttttaatattaatattcttatcagatatctggttttcaagaatattctcccattccaaaggttgtctcttcactctgttatttcctttgctgtgcataaacttttgagtttgatggcaatcccatttgtctatttctgcttttgttgcctgtactttcgaggtcaaatccaaaaaatctttgtccacaccaatgtcaagaagcttaagaataatggacattagcaaaaaacaaatgtgagaagagtggctacttttagggtacaaaacattcacccatccagtgactttcataagtgtgaccttctaattaatctgaccattgtcacctgatagccccaagctctggcactgtcccattacatggctttgtctgcctttgatcttaaaatttggtgtgttaacatacgattatatttatacattcatttatatgtttgacaaaaatttattaagttcctgctgtgtgtcagataatgtgcttaccactggagagagtactatgagcaaactaggcacaatggctgacctcatggcacttatacccagtgagagacagatattaatagataatctcacaaataaattatatataatctacaatatatattctagagatattataagaatactacaggaatttactatatatactataataatactatagaaatatgagaaattgatatagagacttgacctagtctaaaaggtcataggaagacttacctataaaataatatttgagttaggaattgaaagatatttactggcttttgtttttatccacttatatatttactcatttatccaccaagtatttattaaagaccttctctatgctagatgctatatttagaaagagacaatttcctaaattctgggaacagtctttaatttcttcttttacacaaatagtattattatttcagggaaacagatattgaagactctgatgatattccagaagataccacatataagaaagtagtttttcgaaagtacctcgacagcacttttaccaaacgtgatcctcgaggggagtatgaagagcatctcggaattcttggtcctattatcagagctgaagtggatgatgttatccaagtaagtcttttgagcactgctaagatcttcggaggaatttccacaagcaccagagggttgtaaaggtgcaggtggcaagagagctataggtgatttgtttgttttccaggattaatgaataattacatttcttttcaaagactccttgccaagcaatttggcaatcttcgaactaaaaaaaaaaaagatctcattttttaaatgctgaaaactatataatctgtggaaaatctttctgtaatttctatctaaagctaacctatctaaagttaacacagaaaattaatatattcaagagcaattgaattgggtttcatagcagtggtggtggtggtggcagtagcagtgctagtagtaatagtaatttagaaatatcttcaggtgttttcctaaaaattaaataaaatgaagttaaataaaatgagtaaggaaagtaaagatgtctccatgccctccaaaagtgagcaagtttcttcagtgtcttcctagttctggtaatttctttcaaaatcttgtgtccagacccacgattataacttgcttttataacaaagtttacttccgccatttttgctaaccgctcacattcaaaaacccagaaagaaccctgattctaaagtaagctattctagattttaaaatataatctactatacctgtgtaagcattcactacattttcagtgaccatttgctctttttaaaaacgtaaacaagtacatagggatataagaatcttaattattctaaattttccatgaagctatgggaggcaatattctcttttatgattaggggatcctttttcaagatgaacgataatttaacacaatatttaaaaaacttattctaagtaactcaggaatcaaaaaccagacactgtatgttctcacttacaaatgggagataaactgcgggtatgcgaaggcagacagattggtataatggacattggagactcaaaagggaacgggggatggatgaaaagctacctattgggtacagggtacactactcaggtgacaggtacactaaaatcctagacttcaccactatacaattcatccatgtaaccaaaaaccacttgcattcctaaagcaactgaagttttttaaaaaatttaaaaatcaaaattaatgcacgaaagccacaataaacaaaacctcacaattgtgaataaagacaggataagtaacaatgttgcattgagacatactggagccttaggcaaaaggaaaaaaatcaaatactgaatctttgttttagccctggatttcactagataaaaatgacttcatttgtgtatttttaaaataattttaacttttattttagattcagggggcatatgtgcagttttgttatctgggtatattatgtgatgctgttgtttagggtatgattgatcccatcatccaagtagcgtgcatagtacccaatagtttttcatcccttgctcatctccttccttcccccttctagaagtccccagtgtttattgccatctttatgttcatgagtacccaatgtttagctcccacttataagtgagaacatgtggtatttggctttctgtttctgcattaattcacttagcataatagcctccagctggcatccatgttgttgcaaaggacgtgatttcagtctttgttatggctgcgtagtattccatggtgcatatgtaccatattttctttatgtagtccaccactgatgggcacctagattgattccatgtctttgctactgtgaataatgctgtgatgaacatcctagtacatgtgtcttttcagtagaacaatgtattttctgtctttctttcttttttttttttttgagatggagtctcactctgtcgcccaggctggagtacagaggtatgatctcaactcactgcaacctctgcctcccaggttcaagcaattctcctgcctcagcctcccgagtagctgggattacaggcacccaccaccatgcccagctaatttttgtatttttagtagagacagggttttaccatgttggccaggctggtctcaaactcctgacctcgggcaatctgcctgcctcagcttcccaaagtgctgggattacaggcatgagccattgcgcccggctgaacaatttattttcttttttggctatatacccagtaatagaattgctaggtcaaattgtagcaggacaagccacagacaaaaacccctcagacaccaagttaaagaaggaagggctttattcagccgggagctttggcaagactcatgtctccaacaaccgagctccccgagtgagcaattcctgtcccttttaagggctcacaactctaagagggtccacgtgagtgggtcgtgattgattgagcaaggagggggtacgtgactgggggctgcatgcaccagtaattagaacagaacagaacaggacagggattttcacagtgcttttctatacaatgtctgtaatctatagataacataaccgattaggtcacgggtcgatctttaactaccaggtccagggtgtggcgccgggctgtctgcttgtggatttcatttctgccttttagtttttacttcttctttctttggaggcagaaattgggcataagacaatatgaggggtggtctcctcccttaaaatagtagttctgtttcaaattctttgagaaacccccaaacttctttccacagtggctaatttacattctaagcagcagtgtataagcattcccttttcttcacagcctcaccagcatctattttttgactttgtactaatagccattctgactggtgtgagatggtatttcactgtggtattgatttgcatttctctgatgattagtgatgttgagcatttttttcacatttgttggctatttgtatgtcttcttttgataagtatctgttcatgtcttttgcccactttttaatggggttatttgtatttcgcttgttcaattgtttaactatcttatagtttctggatattagacctttgtcagatacatactttgtgaatattttttctattctgtgtctgttcactctgtagatagcttcttttgctgagcagaagctctttagtttaatttgtcaatttttgcttttgttgaaatgcttttgaggaattagtcataaattctttcccaaggctgatatccagaatggtgtttcctaggtttttcttctaggattcttatagtttgaggtctgacatttaaatctttaatccattttgagttaatttttgtatatgatgaatccagtttcattggattcattggggttcagtttcattcttccacatatgggtagccggctattccagcaccatttattaaatatgagtccttttccccttgttttttgttgttgttgttgctgttgttgttgactttgtcaaagttcaggtggttgtaagtgtgtggctttatttctgggttctttattctgtttcattggcctatgtgtctgtttttgtatcagtaccatgctattttggttattgtaactttatagtatagtttcaagtcaggtactgtgatacctccagatttgttctttttgcttaggattgctttggctattcaggctcttttttgattccatatgaattttagaatagctttgtctaatcctgaggaaaatgattccagtagttgttaaaaaatagtgttgaatctgtagattgctttgggcacaatggctattttaacaatactgattcttccaatacataagcatagaatgtttttccatttgtttgtgtcatctatgatttctttcatcagtgttttgtaattcttcttatagagatctttcacctctttggttagatgttttcctaggtattttgtatgtgtgtgtggctatgtttaatgggatttcgttcttgatttcgctctcagtttgaacattactgatgtatagaaatgctattttgtacatttgtacattttattttgtataattgattttgtacattaatcttgcatcctgaaactttactgaagtcatttatcagttcctggagccttttcatggagtctttagggttttctaggtacagaatcatattgccaatgaagagagatactttaacttcttttcttctttggttgccttttatttctttctcttgcttgattgctgtgactagaatttccagtactatgttgaataagagtgatgagattgggcatccatgtcttgttccagttctcacggggaaggctttcagcttttgctcattcagtatgatgttggctgtaggtttgtcatagatggctcctattagtttgaagtatgttccttcaatgcctagtttgttgagggtttttatcatgaagggatgttaggttttatcaaaagctttttccacatttattgagatgatgatactgtttttgtttttaatgcggtttatgtggtgaatcacatttattgatttgcatatgtggagccactttgcatcctaggaatgaagcctatgtgattgtgatgaattaatttttaatttgctgctggatttggtttgccaatattttgttgaagatttttgtgtctatgtacatcagagatattggccggtagttttcattattcattgtgtctttgccaggttttgttattagggtgatgctggctttgtagaataaaataaggaacagacaattagggagtctttaatcactagaagttatagaagggctgggaggagcttcatgggtctgactgctggggtgtgaagacttctcatatggcatttaagtcctttaccatctggccccaacctgctccttttctagcctcatttctcaccaggttccacctgtccctgtgcatttcacagcccagttccaccgagatccttgctattccccaaactcttcctttactcccctgctcacaggcatccttctgcccttctgagagtctgaaatgtctttctagctcctgttcattctatgatggccaattccatttcctctaagaaacttaccttaattcttccaaccactcctaaatattcaaccaaattgttcctccagggcattgtcatctgaacccacttagactttgtatatagcacctgttgtctccagatttgtagtgtggatgcccatgtgcatgtctgtttcagcagtagcttaaaagcttcttatgaacaagaatcaagcttctttcatcttcacatctccactacctatcactctcatttcattagtagataatgtcagtactttagccttgagcctaagaacaaatatcttttggtatttctggagaaaactacttgggccatatctcacaggatggttatgaaaattaaatgaaataatatacataagttattttgtaccttatatcttagctccgattttataaccagccattttgacttataatgctgacatttttgtggtttagatttttgttaagcttaagtacatttgtggatcattccttttcctaggttcgttttaaaaatttagcatccagaccgtattctctacatgcccatggactttcctatgaaaaatcatcagagggaaagacttatgaagatgactctcctgaatggtttaaggaagataatgctgttcagccaaatagcagttatacctacgtatggcatgccactgagcgatcagggccagaaagtcctggctctgcctgtcgggcttgggcctactactcagctgtgaacccagtaggtactttcattgaaagtttttctcattcccctaacctcgtaatctgaagtccaccaaatggaagagtcggggttatttcttgtcaaatgtctgtcttgcttttcatgaggaatgcataagggtgtggttaacagtctgcatttatcataaccagggactctccatgcagctcttcagatgacagagagagaaacatttattcagtggagaggaggaaagattacttgaatgattggccatgaattagaatgcctacatttacagaagatggcatttatttgaaattttcttgaacaagtattagctatgttctgctctttctttatgaaaagaactgcaaagtcaagactcctttatctgacattctgcaatgtatatatacttcaaaacaatatgtcatacacagtatatgcatacaattttatctgtcaattaaaaagagaaacaactcctccatttcaggcatagtggaaagagcacagactcagatttaaatttttaccctgtcaatgcataatcctaggaaattccttgacctctcttagcctggtatcagaagttaaaaatgagataacagtacatagtgcatggtaagcacttggtaaatatttgttcaatgaatgaatttatatttaccatataagatagttgtcaggattaaatgggagattgcaggcaaatcatttaatatagtaatagattctcaataaatagtatcccttatattatcaatttattattatcatcattgttactgggataaagatcaatcagaggaaggaggattatgaatacaacagaattaggtgataaatatccaggcttattatgccattcatttataatcttcatcttcaaattcagagcctatcagaaagtttccttttctatatgatgagtgattatcagaagagcaaggaaattcctgagaaagaggcaatacaatttactctgtttttccaggaaaaagatattcactcaggcttgataggtcccctcctaatctgccaaaaaggaatactacataaggacagcaacatgcctatggacatgagagaatttgtcttactatttatgacctttgatgaaaagaagagctggtactatgaaaagaagtcccgaagttcttggagactcacatcctcagaaatgaaaaaatcccatgagtttcacggtattttcctcggactttgatctaatctcctaattaaatcacactgggtcacagtgatttctgcccttagatattcacaagattagacatgagatgcttctgagacacccagagctacaactaaaaccggttccttaacattccagagggctgatgtaatctggcaggtgacactgtgggtgaggcaaaaagagaaagtctgaaagatagcacagagaagctgctgcaaaacaaaccaacagaaaaccacaacaacaaaaagccagtgtgcttcagctggtaacatacattgaaaaggaattaacattgttctgcaatttaaagttaataagcttgtttctggatctctaaaggcacaagtgtttatataaaagaaatgatcacctgtgtgtcttttctaaaataagaatgacgctaacagttttagctctcagcagctaccaggtggcacccaaagcatatgagaacaaaatgagataagaaactaggtacccaggtaataggagaatagtggcaagagagcatttgggtggtcacactgggaaaagtgtgcctatttggaaattcacaaggaaaatttgccctgtaagctagtaactgaaacagaaactgagaagagaaaggtacgagcttgtgttatgaatatgtagataggtgttctcacgcctgatataatttgaaggatgcccaaatgatctcaacccgtccctctccaaaaattcacctgcctggtttctgaaatttcacagcagttcctctaacttaagaaggaggaaacaaagcacttccctcactttggtttcagttaaacgtttggtaacactaaactttatctttacagttttgtgttacatttttaaggtgatcaagtttctcaggaactttttaaaaaatccgcgtattttactgtggggagagtagataaagcctgagaaccctagttatctaatctgagaagtgggcagaggagttgtcataccaataagagaataaacatgacttgctatggttgctggatacaccaacgataaactcctaattttataaactcctagacttcctaatttgcctgaaactttctctgaatttagaaggccttaaggtgacatgctgcatatctccttgctgactctaatccctggagtttactttgtctgcccatatttgtatttatcttttgtagttaaggaaaattaagactgttaatggaaagtatacacgggtaaagcacggaactgtaaaagctgaggaaaagagtgataaactgcttggaaagggagttccccctgccttctgctgtaggctggtgtgaatgatatgagaaggactagtggttctgctttagcctctcactaatgtgacatacaagagggccctttccatggctaggtaggcctgggaatgcagaatcatgaggaacatgggtgttgagtgggttgccccatatttccttaccactcgccctctctgtgtcaacagatttttaattgatttcaactctttgtcctttcagccattaatgggatgatctacagcttgcctggcctgaaaatgtatgagcaagagtgggtgaggttacacctgctgaacataggcggctcccaagacattcacgtggttcactttcacggccagaccttgctggaaaatggcaataaacagcaccagttaggggtctggccccttctgcctggtaaagattgggtaatgggaagaggtccctgctaagaaatacagggaaaaggcaatctgtaactccttctcatttcttccttgtgcatatacttcctaaggggtcagaacacagggttctggcatagagcctaggcaaacccatagacccaaagtatatacggagtacaaaaatgtcacctaatttatgaactatttgcagcaccacacaggctaaatgtgtgacccaactcagttgcaacataacatgcagtttctcccaagccactgtgtgtcatacagatgaggtcttaagcagatgaaaaaatgaatcccacagggctcaggcagctacagctatctctgctgggagggtttccagattcttcagttctgctcctcttctaggccctatcaccctaatatctttgggcaagtgactccaggaatcacattcttaaactgacttatagactgtttgaagaggaaaacatttttaaaaaataataataaaagttaaagaataacaaaggtatttagaacttttcatgtgcaaaataaagataaatgtagatttaaacagtctacaattatacagaagggatgtttctgtgccaatgagttgtttgtaagtgtatctacttgtgcagcagtataaaaacctaggaagtcagttaaaatgcagatgtgaaggcagagggattttgttctcagagactttaaagtagattttgggcagaattccaaggagtctgtatttttaacaagcagccttccttctattttgccttctattaaaagtaatggcaaaaaccgcaattatagtttgcaccaacctaacacatgctgcctgaggagttagtgaaggcagcccctcgacagcactttgggtgacgttgtgtgaatctgcctcagatgcagacacagaagtccaaatggactggtttgattaagagcagggaaaaaaagagggttcttattggtttttcacatgccagtaactcactaatacatctagagagtattaattgtattatattaatatcatattaattaattaatataataattaatagataatttattgtattaaaatcagagacagaagagattcagtcaaatttactcatcttttcatcaagtattagaagatcagtcatccttcctatcagcctgcagacagactgagaagctaggattggctggtgtctctaaatctgcaaacctaaatacctgcattggagagaggaaaactggagacatttttcagtgtgtttgaggaagataatcatatctattcattttcacccacaatctgggaaacagtcataaattatagtcaacagaatttaaatattaactgccagggggtaatgttaaataccagaatggatagccagaggttttagaaatctcattctttcagtgttttttctgagcaatttatgtaaatctctattcaaatatgtaagctttatggaaaacttgaaaacatggaggaagaaggttttatttttattttcttatataaaaaagagaaaaaagcaaaaatgaaaagagggaaaggaaacatgtatgatatttttgaagcccaatgatgtcattcgaggtcactttgataattaggactgtgaagctgtattgtatgtgagttaatttgtaacattatatttagataagtgaaagtttcttctagtgaggtgtggtggtgatttaaaattttttttagttatctctgtgtatgtgttgttattgttttgtttttatctgttatactttcagtcctacctaaagaaaaatggttaaattctatttgaaagcctcttgtgaagcaggaattttaggattcttagagaactatcaaccacaatatttacttgttaatttttgcaaatgtaatgttgttctttttattttaggttcatttaaaactcttgaaatgaaggcatcaaaacctggctggtggctcctaaacacagaggttggagaaaaccagagagcagggatgcaaacgccatttcttatcatggacagaggtatcacaagagccatgtgatatttggtttggcaggagagtgcctattactagaatattaccaacttttagattggaaatattcaactctaagaactctgatgtgacaaaggcataatttgtagccataattgcttttattccggcccatggtctgattgcattgaaaacacatcagtcagatcaaaagcattcctgtcaattgggaaacctgtgtaaagcatccttcttcatgacttgtgatccatggacaagtgcatataagaaattttccagcttccaagagttgaggagggaaaaggtcacaggaatttaacaatgactgagtcactaaacttgacatttcagcatttaggaaacacagttttcatctgtccatctgttcatccattctttaagccattactaagcactgttgagtatgaagcactgtgccaacatccaggtagcacagtggctggtatcccttccttgatcaagatataaataaccttgtaactttgaggtcaacttttgagaacatagtctcatcaggactagaactttttttcatatttttatattttgtatttttattttttttgtagagaagaggttgcccaagatcaaactcctggcctcaagtaatcctcccccctcggcctcccagagtgctaggattacaggcatgagccactgcacctggccatggatggtacctaatgttgtaaaatagcataatttaagataaaagcagaagaaaatcagtttaaaaaatgattacatttcaggatttcagttgctttcttctaggatgccactatatctattaaagcaccagtcttgttagtgcatttaccattttataatcagatatatttaagtcagggccacacaaggtaggtaaaaatatctaattattgagtcagaaacataatccctaaccatggagttttactttattgtatatattttctaagcaaaaattattcattttttttctgtttttcatagactgtaggatgccaatgggactaagcactggtatcatatctgattcacagatcaaggcttcagagtttctgggtaagttgtagcaccatggtctgtgaatggtaccccctacagttgtgcagcatgcagcctatgaaaccatacatgacaatcctatctatgaatcagtttttctctttatgcttttctctacgacaatgtagtgaagcagctccatttggggtacatatatggtaaaggaaggaacactatggtaggagctaaaggcctgttagtgtgctcttaacactgccacctcttctggtgtataatgatcccaaagagtcttttccaggaaaaaccgatagctgggggtcattgatttctctacataaaaagcccagcctctctgcagggatttggcaaggatcagataccttagtcttatgaccacgcgcccatttccaaaactctcctcagtcatcttttctgggtttgaccacacatgtagtatttcagccagattcacagggtcttatcagccaggcattatagtccccattaatatggccctttgcctgtggcaaccattcatctattcagaaaactttgttgaacctccactatatgtgaggaactcctccaaagttttcccacactgcctcaaagcccttcccaagatcaagaggtcatgatcaagaggatgatgaggctcccatatacccttccatgtcttcctgttaggcaggcacattcagcattaggaatataaacacaacagaaaaaatcaaacatgacctgtgtgcaagaaaggggataggaggtggttggcagttgaccaaacacagacctgaagcccagatttcatcatcaaggactggcctagtagctgaggcccatgcctagactcctgactacaacacaggtcctccaaggatctggttttccactggattaaactcacttgagaaattgctgggtttttaaaaaattcagaataaatctttttcttcccttgagtttaggttactgggagcccagattagcaagattaaacaatggtggatcttataatgcttggagtgtagaaaaacttgcagcagaatttgcctctaaaccttggatccaggtttgtcttaatagactgataatatttactgctatcgtaataataaaaatgaaagtgatttagtaattccttgttattgttcttgcaatgttgttaggggaaatagcaagtactaagtgtgaggcactgttctaagtactttatatccttaaaatcaaccctctgaggttggttctaataatatcttgttttatagattaaaaaacaaaaggcacagagatactacctaccttcccaaagtaacacacagctaattagtcattgagttgggattcaaatttaggtactctgtgcccaaatatgaattgcatgtagtcattgtatcagtttgctaagatcttatgtgctagctctttagttctgaagaaagctgattgtataatgaatttaggcagtgtgtgacttgttgacaaggacagttctgtttactggctttcctatattgcaggtggacatgcaaaaggaagtcataatcacagggatccagacccaaggtgccaaacactacctgaagtcctgctataccacagagttctatgtagcttacagttccaaccagatcaactggcagatcttcaaagggaacagcacaaggaatgtgatggtttgtgtgcatatttctatctgaatctctagactctagacttggcctagaattattatgactatacctaatgattatgtattttaaaaaatacctttctgggtattagaaatgtgaatggctttctaagggtcatatggagaaaagcagtaatatgataggtctgtgtcttacaaattaaagagagaagcagggttactgaaacttcaaaaccccacaaaactttaaaaaatcattttatcatcaaacaaaatacccagatttctcagactggccaatggtatacggcagagtagaacatctggtcttgcgcctcaaggagctcatgctaaaaattggctaccaagacttttgattttactattgtagtttgttttgttctttatttcagtgtacctgaagtaaatagtagtgttaatgctagtaagcctctgaggcagtgtgattctcagactttttggggggccatgcctgaggaatgacattctccttctggttcttccaggggctcagccataagccctaactcttctcctcctctctattcccttccccaaagaagtctgaatgcaaggagtctgcctgccattattataccaataaccttgagtctgtttctgcttatattttatataaaattatttactgtttattagttacctatttttaataattatttatactatgtctcagaaccattgaaatcctaaattatggttcttactaatcagtattatgagagaaaacacagattgcagttgagtccatagcataaagattttgtcgtctatgttcatgagaggatattggtatatagttttatttttttaattgtctttttctgtttttgataccacagttatactagctttcataaaattggtaagcatgctcttttctacattctaggagaaaatgtctgcaattggtaataattctttaaatatttggtaggaatcactagtgaaaccatctgggcctgcagatttctttttgggcagtttttaaattacagatcctatgttctaaatagttacagggctattaaaattatctatgtcatattgggtgaattgaaatactttgtatatttcaattaactggtcaattccctctacgttgttaagtttatatgtgtagagttgtttgtatattcccttatcctttttcatgtttgtagtgattttgcctgtttcatctctgatattgtcatctgcccctcctttcttttttgtgtgaatcttgctagagatttgtcgattttaaaaaaatcttcttggccgggcgcagtggctcacgtctgtaatcccagcactttgggaggccgaggtgggcagatcacgaggtcaagagatcaagaccatcctgaccaacatggtgaaaccccctctctactaaaaatattaaaaaaaattaggcagggtggcgtgcacttgtaatcccagctacttgggaggctgaggcaggagtatcgcttgaatccggaaggcagaggttgcagtgagccgagatcacgccactgcactccagcctggtgacggagtgagactccgtctcaaaaacaaaaaaaaaaaaaaaatcttttcacagaaccagccttgttttattgatttttctctattgtttttctgttttcagtattaccgatacctgctccaatcttctgttttaaaaagttggctttttctgacattgctctgtcaggaaaaggggtagggcacagcctgtttactgccaagtgggggtcaaagtccaggttccccactccattgccacctaagaagggattgttccttggtggctgggtgggaagggaagttccccatttggcctccactgatactgcaggggcaggagcttcattaggggctggagatgaaagccctaaatccctacatggccttttctgacacaaccccagtgagggtgtagggtgcctctttagcctcaggagcatagaagtctaggctccccattcagcctttgctgttgtgggttggggaggggcctcaggtttttctgtggtgtttggctaaaggagagaagtcagtgtccaccagttttctatcatatctcgctatgctgccctttactggtactttggttagagaaagcagattttatttgggctttttcagtctgtactcattggtgtttccaggttgccggcttcttcatctctaagtctgggatttatgaggcaaaaagaaaattcaagacactgatcaccattttgttccttccgagaaccctagccagtctgtcttctgagctcttttcagggtcttatgtttctctgagctataatgtccaaagtttttagttgtacttagcaggaggaatagggcaaagtacatatatacaatcttcctggaactggaattatccccaagtatattttataaccaaattgatttagtttggaccccatgaaaatgtagtattacaatattaaattagatcaaaattttaatataaagtcactttatagatcattgttacataactaaactttcctcttttcttctagtattttaatggcaattcagatgcctctacaataaaagagaatcagtttgacccacctattgtggctagatatattaggatctctccaactcgagcctataacagacctacccttcgattggaactgcaaggttgtgaggtaaatggtaaggtacaaagatgcattattttctcactgccactcaaagaatcaagatttgggaggtataggagaatgagtagaatttttagttcttttcagtgacttaggctcctaggaaaacctttgtgaaacagaggttctactcaggtaaactctcagtgtgatctagaccaagaatggttctgccaatcagagtgccgacagcatctctgtgaagaaagtgcctggattatatagacacatcacaactctccaaggaagggctctaatttggaattacctccatcagcccattttcaataagacctacctgagattcaaactaggcctgactcttccaaagtcctcaggtcactcaaacttcaatgtcatgacagtatctggcaacatcactgccatatatatggtgttcaatgagtgtttttgaaatctgaattggcttcccaacttcctgaaaccacaattcttctttatattttctttcataccctgtgtaggtactcaagtcttttctatgttagctgctatttctcaggggctgtaatgtgacctgtggtataaataaatccaggtaatcataaatggtcataataaaattctactatatatagcaaggatgtttaagagtcttaactgttcttcttggactcttaaagcagtgctttccaatattttttacttcaaagcacacaaagaaaataatatctgcctggcattctgaggtaaaagaatgaagcaataaatctaaggcttggctgatccaggccccacttggctgctgaagggctggaggtgggaagagggatcaataaataggtgcactagaaacctgccatggcacacctgtcaggagttgcagtacttccctttgggtggagagaagccaccatgattcacaatggagaaagtagctgaaacctggaatcagtttcctgttgaagcagataatggcacagtatacccttggatggatatgggtattttgccaatgtccagatagcagtagtctaaaacatctcccaaataaaacacagatcttgtatcggcaggaccactccttgaaacagttccataagtcattgcgtttttttctttccatatggtataaatagatttgttcagatcctaataaactaccctaaaatgtgacattcaattctgctaacttatttaaaacatctattttttatacaagaagcattattttcttcttattcattttcttgatacttaggtaattattagcagtgggtattatttttaggaccctttgtttttttcatggagaaagtaaggcatcacttcaagaaaatttctgcatgatttaccaacaagaacaaagtgtcacagagatgatgggtggtcagccaggttcactcactagctgtgtttcttacagtcacaggtctgccttgctgcctatgatattcaaattacaccttggaaaaattccaaagggtacataactcgaattaccctctaagggttgaaacagaaaatattaaatagtgactgagggtccattgtatcttcttggtagcttttgttagaagaaacagagtatttttatatatagataatttaggattattgtcacctgaaagcaaagaccaaagtttccaagactctcagaaggaggaagtgagtttaaatgtttagaacatggtatttggtatcagattgtctgaactcaattcagtttctgattcttgtggctgtgttaccttagacaagttactgtgttttggctgtactaaaatggagatatttatgagcattatataatacatgtaaagcctgagaacagtatttggcacttggattcaataaatcttcattgttgtggttattgtttttgtcatttgttggtagtaatattatttcttatctcctctgcagtgcatgaagccatgcagggaatattggtgtgtaattaatcacgttacttttcttttgataggatgttccacacccctgggtatggaaaatggaaagatagaaaacaagcaaatcacagcttcttcgtttaagaaatcttggtggggagattactgggaacccttccgtgcccgtctgaatgcccagggacgtgtgaatgcctggcaagccaaggtcaagtatactctatgcatggtgttctcttagggctccagaagaaagcaaaggccctcactaccacaaacatggaggatctgggaagcaggagtattttaatctgtttctgcagattaaaatcctaggtccaagagtccaggatgtctgtggacttgatagctttgactataactttgtctcagagagaagtcatttatcatctctgtggtttttggtctagtcttgatttaaaccaataataagcaaattaatttttctgcaaagggatagatggtaaatattttagtctttgtgggccatacattctctgccataactactcaactctgccattgtagcagtaaagtagccataaacaatatgtaaatgaatgagctggctgtgttctaataaaactttgtttacaaaaaacaggcagcgggccaaatttggcccatggatcatagtttgccaactcctcatttagacagcttacattagtgataaaaaaatgatttagatttgcaacatcatctcttattttttctttacaatttagcaatattttttcattttcctaaatgaaatgtcatctaaacttttttgttctcttccccgccctccttattttaagagctttgtgatattccttgaggcaactagaagcatagtaaaatgttgcaaaaccagagttataaaatcagtgatctaagttaaacaaacaccttccagagagttatactgtccctgatattagcccactgagtaattcaggtgatttaatttgggggtaactcttaatatttgactcatttttattaattctttaaatgacctgagatatcagaatggcatgaataacttgatgatcccttcagccaactaaatccaaattccctaatttctatcctcatatctccctcccttaagatacctacactccaatttcctggctttctatagaattccagggcctatccttaaattaggccactagaaaggaaaaaagaattgtggtgctggtggggtaaatagaaaagattggattccacacagtcttgggaactgatatctgtgtcttgaaactcattctggcccaatatggaatcacagaatgttacagtagcaaggagcaaagcatctggtctagatttttccttttaattctaaatacacaggagattaaataattttagcttagtttggtagcagaatcaggactagaatcccattctcccagtaaacaggccatgctccttccaccatttgaagcagcccaaatacctcattttgcaattttgcagagggcaaagctgacacccagagaagttaaaataataaaaatagtgttatattacatttatataatttacatagcaatataaataataattaaagagatgttatccaattctttttcagatgactctttagacttgttcatggtataaccttgtcactccatacttcattttacaatcttttaaaaaaatttgcactctctataatttgctcttagtctttgtgatataacaagggcctcaaagataaaatgctaatttttaatggtgtcatttcaaagttagaattcgggatcagaaatatgtgttttacttaacccccttccattcacatgaaatgtctttatatggtctctttagagaggttgaaaatcaaagctggacatatgcagtgatgcacatagatgctgttctctccataactaaaatgtctctacctcttttatgcctgtgaaaacctctagctggttatactctgcatcactggtacaaccttgatatgaagacacactaagataccacccagatgtcactagaggatgttatagacttaaaagttttctcatataatcattctaattcagttaatttgcttttaaaatacatatagcatgtgaatttttgtgtatacacatatatacacatacacctatatatacacatacacttatgtatgtgtgggtgatgttgaagaaacatatcaatattatttcctttagaattgaatgaggttatggtagacgataaatctcccaaaggtaaaaatttatcttagatgactctaaaactcagtttagaccttctgatctttctccaaacacatatcaccaaccatgtgattaggcattttgttaggccagagacaggacaataactgtactgtgtatcaagctctacttatggttttatcaggtctctcaaatgttacatttatttgaaatattagaagaaattgaactatttctgctctttgacattaacagggggaaagagaagttgtgttttgtaaaacaggtgaaatagagagagaatgctatccaattatttcccagataaccctgcagcaatattaccagagtatttaaagaaatttgcttaagaaaataatattcacagataatttagcagtttaattatttttccaaataaagctcatttattcattcatttattcaacaactatttattgaacaccaactgagtgtcttaacattgtggtgagtaccaggaaacaaaatgaaataagcctctacccttaagcagtaaggaatgctaagaaggaaacaattatagtacaatgtgtgaaatacttcaataaaaatttacacacatattgtggcaatgaagaagaaagagggaaagcttctaggagactgtgaatcctaagggataagatagaacaaaatccttttgagctctgtgcttttttgcataacttggtctaaaaaaaaagcaaaggttttaacatcttccttatctatgtgtttttgtcattttcataggcaaacaacaataagcagtggctagaaattgatctactcaagatcaagaagataacggcaattataacacagggctgcaagtctctgtcctctgaaatgtatgtaaagagctataccatccactacagtgagcagggagtggaatggaaaccatacaggctgaaatcctccatggtggacaaggtagagtggcatctgggcaaagagaaagcaatctgaagactgtgctataatgagaataacagtattttgcatttgacaaatatgcagtgacatgtaccacctctttaagtcttctaaatcttagttcttaaggtgcctggtctcagacaaactcctggttgtctgttttggtttgttttatttctcactacaccaggttgccctcataggaggataaatatcattgtcataaaaaaaagagtgattttatttctggtgtgtgtaaaccttggggaacttgctgatgatggaagggggaaagttatacactttagttgaggatataaggtacatgccaacaagaataaataaattaaaatgcatggtcacattttaaatgttagcaatagtcaaacatttattggtggccacttcctggcacttactatgcacttacgttgacatacatttttaaatatttacaatgacttctgtgaggtaaaatgttattatccttattttgccaatgaggaaatgaagaatcagagaataagtaacttgttcagtcatacagctaatacagacgggctgaaggcagaaatggttttgcagctgctccacagcaccatgtgagacttgtttatttttcactaatttaagtcagatcactggtgagatgaaatctatctggcatgtgatttcataactgatagaggatcatctctgtgagagtgttctatgtgttctttgatatgctcattttgagctaataggataaaaaattttctgggttgggcatgatggctcatgtctgcaatgccagcactttggaaggctgaggcaagaggattacttgagaggagtttaaggctgcagtgagccatgactgtgccactggactcaagcctgggcaacagaataagaccctgtctaaaaaaaaacaaaaacaaaaaaccttagccatttatgttgtcattaaagattttctcttatttggctttcagatttttgaaggaaatactaataccaaaggacatgtgaagaactttttcaaccccccaatcatttccaggtttatccgtgtcattcctaaaacatggaatcaaagtattgcacttcgcctggaactctttggctgtgatatttactagaattgaacattcaaaaacccctggaagagactctttaagacctcaaaccatttagaatgggcaatgtattttacgctgtgttaaatgttaacagttttccactatttctctttcttttctattagtgaataaaattttatacaag

SEQ ID NO: 1810 - DNA, 7009 bp, Homo sapiens
gaaaaagcggagggagtgagagccagaggctgctgctgccgtttgcaagaactgcaggggaggaggacgctgccacccacagcctctagagctcattgcagctgggacagcccggagtgtggttagcagctcggcaagcgctgcccaggtcctggggtggtggcagccagcgggagcaggaaaggaagcatgttcccaggctgcccacgcctctgggtcctggtggtcttgggcaccagctgggtaggctgggggagccaagggacagaagcggcacagctaaggcagttctacgtggctgctcagggcatcagttggagctaccgacctgagcccacaaactcaagtttgaatctttctgtaacttcctttaagaaaattgtctacagagagtatgaaccatattttaagaaagaaaaaccacaatctaccatttcaggacttcttgggcctactttatatgctgaagtcggagacatcataaaagttcactttaaaaataaggcagataagcccttgagcatccatcctcaaggaattaggtacagtaaattatcagaaggtgcttcttaccttgaccacacattccctgcggagaagatggacgacgctgtggctccaggccgagaatacacctatgaatggagtatcagtgaggacagtggacccacccatgatgaccctccatgcctcacacacatctattactcccatgaaaatctgatcgaggatttcaactcggggctgattgggcccctgcttatctgtaaaaaagggaccctaactgagggtgggacacagaagacgtttgacaagcaaatcgtgctactatttgctgtgtttgatgaaagcaagagctggagccagtcatcatccctaatgtacacagtcaatggatatgtgaatgggacaatgccagatataacagtttgtgcccatgaccacatcagctggcatctgctgggaatgagctcggggccagaattattctccattcatttcaacggccaggtcctggagcagaaccatcataaggtctcagccatcacccttgtcagtgctacatccactaccgcaaatatgactgtgggcccagagggaaagtggatcatatcttctctcaccccaaaacatttgcaagctgggatgcaggcttacattgacattaaaaactgcccaaagaaaaccaggaatcttaagaaaataactcgtgagcagaggcggcacatgaagaggtgggaatacttcattgctgcagaggaagtcatttgggactatgcacctgtaataccagcgaatatggacaaaaaatacaggtctcagcatttggataatttctcaaaccaaattggaaaacattataagaaagttatgtacacacagtacgaagatgagtccttcaccaaacatacagtgaatcccaatatgaaagaagatgggattttgggtcctattatcagagcccaggtcagagacacactcaaaatcgtgttcaaaaatatggccagccgcccctatagcatttaccctcatggagtgaccttctcgccttatgaagatgaagtcaactcttctttcacctcaggcaggaacaacaccatgatcagagcagttcaaccaggggaaacctatacttataagtggaacatcttagagtttgatgaacccacagaaaatgatgcccagtgcttaacaagaccatactacagtgacgtggacatcatgagagacatcgcctctgggctaataggactacttctaatctgtaagagcagatccctggacaggcgaggaatacagagggcagcagacatcgaacagcaggctgtgtttgctgtgtttgatgagaacaaaagctggtaccttgaggacaacatcaacaagttttgtgaaaatcctgatgaggtgaaacgtgatgaccccaagttttatgaatcaaacatcatgagcactatcaatggctatgtgcctgagagcataactactcttggattctgctttgatgacactgtccagtggcacttctgtagtgtggggacccagaatgaaattttgaccatccacttcactgggcactcattcatctatggaaagaggcatgaggacaccttgaccctcttccccatgcgtggagaatctgtgacggtcacaatggataatgttggaacttggatgttaacttccatgaattctagtccaagaagcaaaaagctgaggctgaaattcagggatgttaaatgtatcccagatgatgatgaagactcatatgagatttttgaacctccagaatctacagtcatggctacacggaaaatgcatgatcgtttagaacctgaagatgaagagagtgatgctgactatgattaccagaacagactggctgcagcattaggaatcaggtcattccgaaactcatcattgaatcaggaagaagaagagttcaatcttactgccctagctctggagaatggcactgaattcgtttcttcaaacacagatataattgttggttcaaattattcttccccaagtaatattagtaagttcactgtcaataaccttgcagaacctcagaaagccccttctcaccaacaagccaccacagctggttccccactgagacacctcattggcaagaactcagttctcaattcttccacagcagagcattccagcccatattctgaagaccctatagaggatcctctacagccagatgtcacagggatacgtctactttcacttggtgctggagaattcaaaagtcaagaacatgctaagcataagggacccaaggtagaaagagatcaagcagcaaagcacaggttctcctggatgaaattactagcacataaagttgggagacacctaagccaagacactggttctccttccggaatgaggccctgggaggaccttcctagccaagacactggttctccttccagaatgaggccctggaaggaccctcctagtgatctgttactcttaaaacaaagtaactcatctaagattttggttgggagatggcatttggcttctgagaaaggtagctatgaaataatccaagatactgatgaagacacagctgttaacaattggctgatcagcccccagaatgcctcacgtgcttggggagaaagcacccctcttgccaacaagcctggaaagcagagtggccacccaaagtttcctagagttagacataaatctctacaagtaagacaggatggaggaaagagtagactgaagaaaagccagtttctcattaagacacgaaaaaagaaaaaagagaagcacacacaccatgctcctttatctccgaggacctttcaccctctaagaagtgaagcctacaacacattttcagaaagaagacttaagcattcgttggtgcttcataaatccaatgaaacatctcttcccacagacctcaatcagacattgccctctatggattttggctggatagcctcacttcctgaccataatcagaattcctcaaatgacactggtcaggcaagctgtcctccaggtctttatcagacagtgcccccagaggaacactatcaaacattccccattcaagaccctgatcaaatgcactctacttcagaccccagtcacagatcctcttctccagagctcagtgaaatgcttgagtatgaccgaagtcacaagtccttccccacagatataagtcaaatgtccccttcctcagaacatgaagtctggcagacagtcatctctccagacctcagccaggtgaccctctctccagaactcagccagacaaacctctctccagacctcagccacacgactctctctccagaactcattcagagaaacctttccccagccctcggtcagatgcccatttctccagacctcagccatacaaccctttctccagacctcagccatacaaccctttctttagacctcagccagacaaacctctctccagaactcagtcagacaaacctttctccagccctcggtcagatgcccctttctccagacctcagccatacaaccctttctctagacttcagccagacaaacctctctccagaactcagccatatgactctctctccagaactcagtcagacaaacctttccccagccctcggtcagatgcccatttctccagacctcagccatacaaccctttctctagacttcagccagacaaacctctctccagaactcagtcaaacaaacctttccccagccctcggtcagatgcccctttctccagaccccagccatacaactctttctctagacctcagccagacaaacctctctccagaactcagtcagacaaacctttccccagacctcagtgagatgcccctctttgcagatctcagtcaaattccccttaccccagacctcgaccagatgacactttctccagaccttggtgagacagatctttccccaaactttggtcagatgtccctttccccagacctcagccaggtgactctctctccagacatcagtgacaccacccttctcccggatctcagccagatatcacctcctccagaccttgatcagatattctacccttctgaatctagtcagtcattgcttcttcaagaatttaatgagtcttttccttatccagaccttggtcagatgccatctccttcatctcctactctcaatgatacttttctatcaaaggaatttaatccactggttatagtgggcctcagtaaagatggtacagattacattgagatcattccaaaggaagaggtccagagcagtgaagatgactatgctgaaattgattatgtgccctatgatgacccctacaaaactgatgttaggacaaacatcaactcctccagagatcctgacaacattgcagcatggtacctccgcagcaacaatggaaacagaagaaattattacattgctgctgaagaaatatcctgggattattcagaatttgtacaaagggaaacagatattgaagactctgatgatattccagaagataccacatataagaaagtagtttttcgaaagtacctcgacagcacttttaccaaacgtgatcctcgaggggagtatgaagagcatctcggaattcttggtcctattatcagagctgaagtggatgatgttatccaagttcgttttaaaaatttagcatccagaccgtattctctacatgcccatggactttcctatgaaaaatcatcagagggaaagacttatgaagatgactctcctgaatggtttaaggaagataatgctgttcagccaaatagcagttatacctacgtatggcatgccactgagcgatcagggccagaaagtcctggctctgcctgtcgggcttgggcctactactcagctgtgaacccagaaaaagatattcactcaggcttgataggtcccctcctaatctgccaaaaaggaatactacataaggacagcaacatgcctatggacatgagagaatttgtcttactatttatgacctttgatgaaaagaagagctggtactatgaaaagaagtcccgaagttcttggagactcacatcctcagaaatgaaaaaatcccatgagtttcacgccattaatgggatgatctacagcttgcctggcctgaaaatgtatgagcaagagtgggtgaggttacacctgctgaacataggcggctcccaagacattcacgtggttcactttcacggccagaccttgctggaaaatggcaataaacagcaccagttaggggtctggccccttctgcctggttcatttaaaactcttgaaatgaaggcatcaaaacctggctggtggctcctaaacacagaggttggagaaaaccagagagcagggatgcaaacgccatttcttatcatggacagagactgtaggatgccaatgggactaagcactggtatcatatctgattcacagatcaaggcttcagagtttctgggttactgggagcccagattagcaagattaaacaatggtggatcttataatgcttggagtgtagaaaaacttgcagcagaatttgcctctaaaccttggatccaggtggacatgcaaaaggaagtcataatcacagggatccagacccaaggtgccaaacactacctgaagtcctgctataccacagagttctatgtagcttacagttccaaccagatcaactggcagatcttcaaagggaacagcacaaggaatgtgatgtattttaatggcaattcagatgcctctacaataaaagagaatcagtttgacccacctattgtggctagatatattaggatctctccaactcgagcctataacagacctacccttcgattggaactgcaaggttgtgaggtaaatggatgttccacacccctgggtatggaaaatggaaagatagaaaacaagcaaatcacagcttcttcgtttaagaaatcttggtggggagattactgggaacccttccgtgcccgtctgaatgcccagggacgtgtgaatgcctggcaagccaaggcaaacaacaataagcagtggctagaaattgatctactcaagatcaagaagataacggcaattataacacagggctgcaagtctctgtcctctgaaatgtatgtaaagagctataccatccactacagtgagcagggagtggaatggaaaccatacaggctgaaatcctccatggtggacaagatttttgaaggaaatactaataccaaaggacatgtgaagaactttttcaaccccccaatcatttccaggtttatccgtgtcattcctaaaacatggaatcaaagtattgcacttcgcctggaactctttggctgtgatatttactagaattgaacattcaaaaacccctggaagagactctttaagacctcaaaccatttagaatgggcaatgtattttacgctgtgttaaatgttaacagttttccactatttctctttcttttctattagtgaataaaattttatacaag

SEQ ID NO: 1811 - protein, 2212 aa, Homo sapiens
MFPGCPRLWVLVVLGTSWVGWGSQGTEAAQLRQFYVAAQGISWSYRPEPTNSSLNLSVTSFKKIVYREYEPYFKKEKPQSTISGLLGPTLYAEVGDIIKVHFKNKADKPLSIHPQGIRYSKLSEGASYLDHTFPAEKMDDAVAPGREYTYEWSISEDSGPTHDDPPCLTHIYYSHENLIEDFNSGLIGPLLICKKGTLTEGGTQKTFDKQIVLLFAVFDESKSWSQSSSLMYTVNGYVNGTMPDITVCAHDHWHLLGMSSGPELFSIHFNGQVLEQNHHKVSAITLVSATSTTANMTVGPEGKWIISSLTPKHLQAGMQAYIDIKNCPKKTRNLKKITREQRRHMKRWEYFIAAEEVIWDYAPVIPANMDKKYRSQHLDNFSNQIGKHYKKVMYTQYEDESFTKHTVNPNMKEDGILGPIIRAQVRDTLKIVFKNMASRPYSIYPHGVTFSPYEDEVNSSFTSGRNNTMIRAVQPGETYTYKWNIFDEPTENDAQCLWYYSDVDIMRDIASGLIGLLLICKSRSLDRRGIQRAADIEQQAVFAVFDENKSWYLEDNINKFCENPDEVKRDDPKFYESNIMSTINGYVPESITTLGFCFDDTVQWHFCSVGTQNEILTIHFTGHSFIYGKRHEDTLTLFPMRGESVTVTMDNVGTWMLTSMNSSPRSKKLRLKFRDVKCIPDDDEDSYEIFEPPESTVMATRKMHDRLEPEDEESDADYDYQNRLAAALGIRSFRNSSLNQEEEEFNLTALENGTEFVSSNTDIIVGSNYSSPSNISKFTVNNLAEPQKAPSHQQATTAGSPLRHLIGKNSVLNSSTAEHSSPYSEDPIEDPLQPDVTGIRLLSLGAGEFKSQEHAKHKGPKVERDQAAKHRFSWMKLLAHKVGRHLSQDTGSPSGMRPWEDLPSQDTGSPSRMRPWKDPPSDLLLLKQSNSSKILVGRWHLASEKGSYEIIQDTDEDTAVNNWLISPQNASRAWGESTPLANKPGKQSGHPKFPRVRHKSLQVRQDGGKSRLKKSQFLIKTRKKKKEKHTHHAPLSPRTFHPLRSEAYNTFSRLKHSLVLHKSNETSLPTDLNQTLPSMDFGWIASLPDHNQNSSNDTGQASCPPGQTVPPEEHYQTFPIQDPDQMHSTSDPSHRSSSPELSEMLEYDRSHKSFPTDISQMSPSSEHEVWQTVISPDLSQVTLSPELSQTNLSPDLSHTTLSPELIQRNLSPALGQMPISPDLSHTTLSPDLSHTTLSLDLSQTNLSPELSQTNLSPALGQMPLSPDLSHTTLSLDFSQTNLSPELSHMTLSPELSQTNLSPALGQMPISPDLSHTTLSLDFSQTNLSPELSQTNLSPALGQMPLSPDPSHTTLSLDLSQTNLSPELSQTNLSPDLSEMPLFADLSQIPLTPDLDQMTLSPDLGETDLSPNFGQMSLSPDLSQVTLSPDISDTTLLPDLSQISPPPDLDQIFYPSESSQSLLLQEFNESFPYPDLGQMPSPSSPTLNDTFLSKEFNPLVIVGLSKDGTDYIEIIPKEEVQSSEDDYAEIDYVPYDDPYKTDVRTNINSSRDPDNIAAWYLRSNNGNRRNYYIAAEEISWDYSEFVQRETDIEDSDDIPEDTTYKKVVFRKYLDSTFTKRDPRGEYEEHLGILGPIIRAEVDDVIQVRFKNLASRPYSLHAHGLSYEKSSEGKTYEDDSPEWFKEDNAVQPNSSYTYVWHATERSGPESPGSACRAWAYYSAVNPEKDIHSGLIGPLLICQKGILHKDSNMPMDMREFVLLFMTFDEKKSWYYEKKSRSSWRLTSSEMKKSHEFHAINGMIYSLPGLKMYEQEWVRLHLLNIGGSQDIHVVHFHGQTLLENGNKQHQLGVWPLLPGSFKTLEMKASKPGWWLLNTEVGENQRAGMQTPFLIMDRDCRMPMGLSTGIISDSQIKASEFLGYWEPRLARLNNGGSYNAWSVEKLAAEFASKPWIQVDMQKEVIITGIQTQGAKHYLKSCYTTEFYVAYSSNQINWQIFKGNSTRNVMYFNGNSDASTIKENQFDPPIVARYIRISPTRAYNRPTLRLELQGCEVNGCSTPLGMENGKIENKQITASSFKKSWWGDYWEPFRARLNAQGRVNAWQAKANNNKQWLEIDLLKIKKITAIITQGCKSLSSEMYVKSYTIHYSEQGVEWKPYRLKSSMVDKIFEGNTNTKGHVKNFFNPPIISRFIRVIPKTWNQSIALRLELFGCDIY

SEQ ID NO: 1812 - DNA, 80264 bp, Mus musculus
  misc_feature (1)...(80264): n = a,t,c or g
cccacagtcctccacttcctggggtgtcagccacagaacaaagccagcagagactccatcagcgcctccttttctcctcatcctcccaggcatagctgcctctgcctctgcctctgggtaccatcccagggaagcagaagatgaagtggaaagtgtctgttctcgcctgcatcctccacgtgcggttcccaggagcaggtaagggctctgtttcccgcggctcgacccttttagagcctctccgtgtgtctgaggggcagcggaggggtgccaaggacctggtgcttcttttaaagcttgtcttcccaaagtcaacgggcagagtgggcagcggcagtgtgggcttgggtcccacccaggcgtctgctctgtgacagccaagctggttatcggttgggggccagctgtttgaaaacacagttgtagattgtctaatgataaaggcaaaagaaaaagactgtggagggaaagggcaaggagaaacgcagcgagtcagcaactgagacagctctgcgcggacgggagaagcggcacaggatccgaaacaccagccagctaggcctcgctcctctactctggtttccagatatcatgactccttccgcccctctctggttggcattgccgctcagccccgttctttcctcctttgccaataaaggacattgccatggtcagtcagaaagggtcatggcctgtgaccctgagtatcctgaaacatctggtagaggccgagcccctacaagagaacttgaggcagggagggagggaggcgtacggagtaggcatccatatttgcagccttttgcaaggcgcattgccaccttctggcccagagcatttaagtctaagctcaccctgtcaaggctgtcccccacatcacagccaccagctaccctatgacatactgattctctgtgatatactcacatggctctctatctgagccaagcagccagagacacggacagaaatgctagcaacaggttgaagaatatgtgttaatacgtgaccatcacgagtcacaaccagcccagaagacaacttgcgccagagcccactgcatccctccaatgcctggcatttggcatgcggtagccttagtgtgcttcctagttcagcagtcggggtggaagcgagggaacagaagacaaaagacaccactcacaagattggtgtcatggccgttttacaagaaatgggacaatctgtatttgaatctagaaagacaaggatggtagctgtaaggggtacccttcctccaatttagagctctcctgagggtgacagtttgtcgggtgacaaggcaggaatggccaacacatgattgttaccaccaggaaactgcacagtcctgggctagcgtcatggggttctgagggctcaggaatgggcttttctgacctagcacagtgcttttctcagaaagggctgggcaggtgtgactcacacagtgctgtagggtaattgcccctgagggagccccagaagccctcactcataggcaagtgagaaacattttcacagccagagaggttcactgactagaggagcagccactgcaggcaggagctctggactcatgaccgtaggctctcaaaagatggagggaggcgaatgttgaacttctctcgccacctctgtctgcacctcactggtcctggtccctgcgctgcaggctttgaagctcaagtaaagctaaggcaagttagggagagaaacaaacggttggcagtaaacaaaaccccacccagagggcacaaagcctgtggtcttttccaccccaaaccaaaaaggcctaagcctttcccatttacaattctttgagaaagcccagacacaggggactaagccaatgttgaactaattaatcagtccaccaagtctaacaagagcatttcgagggccagaggaggcagggagctgctgggtgccacggaacacctctgtctgccacggaacatgtctgtctgccacggaacacgtctgtcggccaaccgtcagcttcttgttacttctgactgccccgccatggcaaaggttgaaaacagaggtcactaccgtgtgtgtccactctctagtgagaaaatgcgcctctagtgtgaagcctcgggtttatgagaaggtctacttcttaggaaggcaggaggcaggggcatgctaaccattgcccttcccagtagcaggtccctgagccacccactggatctcaatggtcctgggttttgttagatttcctctaaagcaaagacagtaatggcttcctcgaagagacgtgacggcaaggagtgaatgcaaggtttcatatacagagatacgcatgcatgcgtgcatgtgtgtatctatgtagatctacagatgcacacataggcacacatgacagacaattaataaatagaaattgcactaattattagatgcagggatggaacctatggctgagatccttaatttataaagcagcaatgggcatctcctgatagcatacgacttgtccctcctgtgaattctgggcacatccacaccagcacagaaacccagtggcaggtgggccctgtggcaaatatggatcaaaacttgggatttacagaggaagaatattacaccaacaaatttcaacctcttaagctacacaggaacatgtttcctcagagtgaaaagaagtccaaaggtgtagcataaatacaggagactggacaaattcaaagaaaatgcgtgatcatggtggccactcaggtctgcaggcatggatgtgggtgaccagggatttatttacaaatatcataaacaccaaatctctgttgaagctttggaagtggagttgaggggctgtaagtgacggatgtgtttcacgggtgtcgtcttcaccctctggtttgttttgtcctccggcgcctaactgcttccgatcctctggcttcattttcctacttcagccctgctcggagctgctagactgcagactgcatttgttgccacaaaacaccaacagccctaaggtttgttagcaggctagctttattacaccgctagctttattacactgctctgtgcgcttaacattgtcagttttgcttttgttttttttgaaaaataagactaattgggtgtgatgacacacacctggactagcagcatttgggaggcagagacaggtgggtctctgtgagttcaaagtcaaactggtctacatagtgagttctaggtcagcctgggctattagtgagacactatatttaaaaaaaaagatttaatttttaaaaatatacatcttttctttcaaaagttacctagcatgtttcttgtattttatttagaagattctgagctccacagagaattgtcttaggttcgattagaataggcacacaatttgagaacacccctgtttttatatctagttaactgattaaacaaatgccagaaatagttcagaatagtttggttttagttctgcatgagacaaagctgctgctcacttacaacaagatgacagtggatgtaatcaactagaataactacccagttattctggtagaaaacagtaaaccggtcatgtgacctgttagccgaaacatgtcattttgcaattgtgcactatgcgtggatagtgaccacgttccccagggaaagagatgcccctggctgctctcagtcacatccctggtgttcagcataatatttagaccagagtcaatgcatggtacatattccagtgtttgttgaatgcattaaaaagtgaccaagtaaaggaaatctagaagtttctgcatgattcacatcatggttttattagatggcctatcctttaaacaacctagtggtaaattatgagtgttaaaaatacaactaaattttaaaaaatcagcaatcaaagggtcagtggtgaccagaagacttcagcgtgagttacaaagttagtttaagactcaaaatggcaattattaaaatgttcttgttcagccatgtgaaattctactattaatatttgcttgttctgagttaagggggtcctagaagcaccgtgtgcatgcatgttaggcaaacactctaccactgaggtatttcctcagctccccaccccctttatagaattttgtcaagatctctccaaatttcccagcctgctgaactggactcattttcagttcaggttgtcctagaacttgcagtgttcctaccttggcctcctggtagctggaactgcaggtctgtgctgtgagactcagctatttattttggacccagagaaaagatcatttcaaatgactagactaacactaatatcttaaaactaagcaaaaatgcactgctttcagcttctgccttttctccagtgctgggggaaaggtgatcaatattggagactggtggtcaatgagctgataaagtaatgaaagtgtcaggagtagaagaccctgtggattccagcaggaatcacagtccagcatgactttcatgtttgatcttcgtgaccagtttgcaaatacatgcgtcatgctttgcccagtatttccttcttggtggacatttgggtcattgctaatgcttgttgttacagatagttttcaggacaatatacatgtaacggggtggagggagtcgtgcaaattcaaggctggcaattaaaaggacaggtcaaaacaaaagaacgattcataggggactccagactccagttgagaacaatcctgttggggaaagaatgtgtctgtccgtgaccatctacaaatggtcgtgcggtgtgctgtgagagagaggacactgtgcagaaagaaaggtctgggtggaagtcaggcctcctccatggcccctgtcgtaggctagcggctcacctcaactttttctttccttcgtaagatggcggtgaaggtgctcccctcactaagggccttgtggagtgtcccggctcaggatgcttggtccttactgtgtgtgcctcagcttcccagtcttcagaataaaatatcatcctcccccactcccccccgcccgagatgcaaagcaggaacgcagctcgagtgtgcctccctcctcttcctctcactaaactgcagtgtaaacttgggcagaaatggctctctgagccttagttttctctggcatgcgatcgaatctgaaaagcaaccatttttcgacctagagctccaatgcttctactggttggggctcccaccttagggcactgttctgaacttgatgggaaaggcctctgctttggaaacaccaagattttctggcttgtcgattgcagatttattgagggccacgcagtacttggttggcgagaaagtaaattgatgcttggagtgactggaccgcagtacgggtccacgctaggctcctgtgctccgttttgcctgtctgatggctgtgcacccagagtttcagactccagggggcaaaataaacagaaagcaggagggtaagggcgagttgaccccatctagacctctgttttctgttttctcgagtgtcaccctttgtatttacagagaacccatggtgtggctgatcccagctatcctatggccggtagctcagaaaggtgtagagttctccttttgtaagtgatggaaatgggaccagggatgtgtgcctggaatcccagcacgggagagagaaagagatagaaggagcagggctccatgcttatccttggctattcagaggttggaagccagcgtgggctgcttgagacttgtctgaaataaaaacattaaaatacagagatgattacattcaaaaatttgatggcttggtcaggaggactgggcctccaacgtgcgttctccgcagccgttgtctctgattgctgtttgctgattggcattaccacacacccgaaggccgaattctgaagcagactttaaaagaattccccttaggaagtgcttaattctattttcttctcaattttcaaagttaaaaaaaaaatcattttgacactgaatatctttgtttggcatacagttttctgctgagtaggaaatccgggcttgtttagaatggaactctgttcatctctggcattattatagatctgagttcacacttttcccaaacctggtaaacccatattttccattttagtcttaataaatgtaactgtttggggagttctccttgggaaagacacatctcagttgcagttgcattcctaggggcgccctccccctcagactcccttatgcatggaaaataaacttaaaatgtaaactaaaccatatttgagagggattgctccaaagaattgactaaaagaacatgttaggaatatattttgatccggtggaaaagccttattgggtggctattcaatactctcaaggaatagtacaatgatagccctagattctaaagtgattttttaaaaattatttatttttattttatgcgcattgatgttttgcctgcatgcatgcctgtatgaggtgtcagatcttggagtttcagacagctgtgaattgccatgtgggtactgggaattgaaccccaggtcctctagaagggcaatcagtgctcttaactgctaagccctaatgcgaatttttcaaaactgaattctcaaagaatggtagaattgtcactgagtgacaacggtttttgattacttatgtttactttcagcacggggctgtgtgttcagggagggcaaggccttatgctattgatggggggcaaagtaaggcaccctaagaagtcgatgctcaaaacaaaaagcaggaagcactgcagaaccagaaacacagatgtctgtgtttcctagagtgaccacttcagcgggacgtttgtctatacaacaaacaggctggcgcactgtaaatagtttccttagccaaactgtggggacagaaagacagcggggctcaaaacacacaccggcatggacactaccacataggattaaataaatgcccactactctcttgctgtagagactggaactccagccatgcataactatataggtcttcaatgtgtgacattgcactagcccaagatacactatgactgacagccctcagccagacctgcctgttctctccctagactgaaaggtgatagtgggagaatccaagagaagagggggtttcctaggggagagagaagagatgcttaggaaggggagtggaggttgcatcccattgcttcagaggagagatggggaatggagggcaggatcaacctgccacggagccagactggatcagtcatggagtggcctgagcctgagtaccatgggttaaaagctcggtgtgatgctggtgaacatgcctgtcgggacgcttccactcatgctctggcgggtgcaggagtctatgtcccagggttcatacatggatgacaaacatatcctcactcagtgtgctttttgggtagaatccaaaggaatagcatccagatagatgtagattctaaggtgattgtgagtgtggtgtgtgtgtgtatgtgtgtgtgtgtgtgtgtgtgtgtgtgtgtgtgaaagtatgattatgttagtgaatgctgctgtgtctatactcactgtatgctaatgcatgtacaagtatctgcaggtatgtgtatatgagcacatcaacatgtagccttctgtgtatcggtatataccatatgtgtctttaagaggagttgttggtctggccccactctgcaggaacaccctgtctccaaaatgaacctggcatttccatctttgcacctctttccacctagttcccaagattcaaaatgctaaaactctgccttactctcagctgtgggaaccctgcctacccacaatgctaagcctagatatctgatgatctcccaaactcataaccatcataaattatctgcattcaaatggcaaaataaggtggaaaattgttctcccaactcaagcttaaaaacacaacataaatatgtccctactgcgagctcttctcggagtttaggtctggcacacagacagtttcagggacacacagaaatcaccagaaaatgtcacctgttcctccaagttctcacaagttccttccataacaatcatgtgtgtttggaggcaaaagagtcaacacacatttgatgtttttcttcttgcaagcaatctaacaaggtagcccctagtgagctgctttggccatcatagcagttggtcaagctagtttgtttttagtgtctgattatctaagctatctgactgactaattcatattgattaaagcaattaaatgctctgaaagcacccccctgtgtctccagccaaataatctatagacgatcagtctaaccagcccactgagcagacccgtttcttagagatggacattcacgatgccggaaaccatattctctggttttcaaaagagtctgaatgtggcttccgacaccctgcttcatggtctggcctaatttccatcagttttgtcgacctgtgctaatttccacgctgagttcagtagcaaagacagcacggatggattggatgccacccaggactgttttgagttagacaggagggcttcagaaattcctcttttgatttctcagagcggagagaaatctttgtcttttctcccacttaactatcggtgcttcaaaagcccagacctatataaaatacacaaatgctttcgagacaaaatgaatcttgcccggtttctttgggcttcggtgggaacaataaagatccaactacaaaaggttggcaaagaggattattctttttctttctattaagcatagaggcttcaaaagaacagcccagaaagtcaaataattgtatccaccactgttcacccatccatctccccgctgacctgtcctgtgaaatacccttgaaaatcttggccgtctctcacctgcccattgcaaatgctgctttgttaaatgttcgagtctgtaattccacgagaaagacctgataaaacaaactgtatttcaatggccacctcatcggggagtagctctttgggctggggggtacttctaattttcggagctttgtagtctctgtgttgggagggggctacttgaagacctgaaaaggagatgtgaatcaagtctacaaatgtttgctagccaaaggggccaaggtggctgcggggaagtcttaggaaacaggtttttgatcttcatggagatctcttgattgctttagtttgggaaaatacatcattcgcttctttagatacaaagtttgagacttgaagctggtctaattgctagcttcctttcagtcctgaacttcctcagaaacactcttgtcactttgaagagcacaaaatggctccttgacaccgagagacacagagaaagattaggccacttagagattcttaagttcagaattgaatgttttctagcagtggtcaagtccggaattgtttcagttttaaaaagcagaatagcagcctctcagctgggcaagcacctaaagtttagtgcaggatgaccatgaaagataatcctaagttgctggtgcagaaagagggtctggtgttgcttggcttgggatgctgtccctagacagtctcttcaaacccatggccttgggttagggagatggctcagcaggtaaagtgtttgctgggcaaacatgaagaccagagttcaatcccccagcacccgcataaaaacaggtagcagcacacacttgtaaccctagctctggaggacagattcatgagttccaggggctcactggcctgcaagccaatttagtgtaacagtgagatctaggctcagtgaacaaccctgtttcaaaaagtaagatggggaagatagaggaagacatactgacatcaggctttagctccacaaagcannnnnnnnnnnnnnnnnnnnnnnnnnnnnnnnnnnnnnnnnnnnnnnnnnnnnnnnnnnnnnnnnnnnnnnnnnnnnnnnnnnnnnnnnnnnnnnnnnnnnnnnnnnnnnnnnnnnnnnnnnnnnnnnnnnnnnnnnnnnnnnnnnnnnnnnnnnnnnnnnnnnnnnnnnnnnnnnnnnnnnnnnnnnnnnnnnnnnnnnnnnnnnnnnnnnnnnnnnnnnnnnnnnnnnnnnnnnnnnnnnnnnnnnnnnnnnnnnnnnnnnnnnnnnnnnnnnnnnnnnnnnnnnnnnnnnnnnnnnnnnnnnnnnnnnnnnnnnnnnnnnnnnnnnnnnnnnnnnnnnnnnnnnnnatgtcccaatagaagttcattgaatgaacctgtgactcaagtattttatgttataaacatgtttaagtttagacaatgctaacacaatggtaggtgaactaggctgaaaaggtgtagggatctctactaagtaacaggaacctttagtcgctggatagggcgtttgaaaagctttatacaagagactgtggtataactatcttaatcagtggttctcagcctgtgggtcacagcccctttgagggtcaaatgaccctttcacgggggtcactcgtcagatatcctacatatcagatatttatattaaggttaacaacagtaccaaaattatagttataaagtaaaaatgaaaattattttctggttgagggggtcatcacgacatgaggaacggtattaaaaggtcaagaagcaggcaggttgagatccactgctcttaacactaactatactcaggggaatgtcatttaaggaaaagctataataaattctttagtattatgaggattaactttctaatttagttatttccatgaatgatactttttattagtttcattttctcagaaccaacaggtaaactacacttttaaaaaacatttattattgttattttgtgtgtatatgtgtatgtacatgtatttctgccatggcatgccagaggacaacccaagggagttggttctctctttctccatcatgtaggggttggggtccagctgaggttcataggcttggcagcaacactgagccattttgggtaaagaaggacccagaactcctggtctgctgtcagcgtggatgagcccctaaaggagaggtgaagcacgagagctcggccataagggctttctatgaagcctgttctctctgagattcccccatctccacccctgcatgttctagtggaggagacataagaaattctcagtgctagcaagtcagtggtgctattgattcttttctaagtctgtccagagcaacggtagtaatggcagcaagcaactggtcctagtcctgtttgacaatgaacttcgcctctgacaggaataggctgccctgctagaacaagctagtagggaaaaagaccgaagccatatagagaagaacaagtaattttcatttggtgaagaccctgctttatagatacacttcattgaggctcgagagacagctcggtggttaagaacactgcttcctcttccagaggacacaggttcagttcccagcccccagatggcagctcacaatcacttgtaactccaggtgcaggggatctaatgccttcttctggcctgagggcaccaggcacacacacagtgcacatagatacatgcggacagatacacattcattcacagaaagtaaatacatcttggggaaaaaaaaccacacttcatgggctagagatggggttcagttgttaagagtgctcacctagcatggataaagctggcagatctctgtgttcgaagccaacctggtcttcagagcaagttctaagatagccagggctacacagaaagaccctgtctcggaaaaacaaaaactgatggatgagaacagggcccacagaatcaactaagccgagctcatatggggctcacagagcctgcatgagtctgggcttggcctctgcatatatgttatgactgtgtacctgggtgttcttaaggtacctctaacaaggggaatgaggggtgtctccaactctctggcctgtgcttgggacccttttcctcctccagtgttcctcgtccagccttgatgtgagcctagtcttatagtaactggatatgcatgctcagttggcatccctgggaggcctgctctcttttgaagggaaacagaggagcagtatatctggggaggactgggagttgtgtaagaaggaaaactgcaaatggaatggaatgagtgagagaagaataaaaatgaaaagaaaaaagaaaagcactcaaaaatccaacaagaaagatcaaggtggatgtctccccccccccccccaggaatgagtgcaagtttgatccctggcctcgagatgtgtacagacatgaacacaaatatgcatacactgtacatacatgagcttaaaagccttcaacatagatctctgaggggacaaactgttcaaagcacagaagccatggtattggtttctgtacccactacaaaataacaatgtaccataaagtagtggctttttaaaaactgacatttacaaccagtcatggtgatacatgcctttaatcccagaagtcagggggcagaggcaggtggatgcctgtgagttcaaggctagcctggcctacaaaacaagtccagaacagccagggctacacagagaaaccctgtcttgaaaaaaaaaaaaaaaaaaaaaaaaaaaaaccaagcaaacaaacaataaaaaccctgcaatttaaactgcgatatgactcagttggtaaaataagtgtgaacacctgagtctgggctcataacccactttttaaaaatgccaggtgttttttcatggtgacacacacacattttaccagttttgagacagaggagactgacagatccctggggtcactagctggccaccctagcctattttgtgagttcccggccagtgagagattctgtctcaaaaaagtagatagtatctagggacaataaccaaggttgtcctcttgcctatgcacgtgcacacgcacacacgcacacacacacacacacacacacacgggcggggcggggagggatccaaaaaatgtattgttctacagttccacggttctggaagctagcaatccaaactcaaggtgtcagtgggtctgtctcttctgggggccgtgagggacaatctgctcacactcctttcccagatcaagacagttttctggggtattggcatatcttggcttgtggctacatttcagtccataccatctaccaaagcttcctgggaatcgtctttcaatggacgctaatcttggccatgcgttcagttaaggatgttatctagggggcttcagaggggcatgaagctttgctagcaccatgtaacaggcgtcacagagatcctgatctgagtcaatcctgatttgatgtctcatttaaatgcaggcacattcctctcagggtctttgaggactataggcaaagctgcttctagggtggcctggtggccgagatcagggagggacacttgcagcctggggtccttttaacccatgctgctctgactggcacagctgcagagcacagtctccggaagatggaataagtgcgtgtcagagggatgctgccttctctctcggaaacaccggggttgccctttagaaaaacatcaccaagcacattctgtagtctcagaatgagttcgctggtgattcaggcagtggggcttgatctgagtttcagacatctctattcatttcacggcctctgtttcccaaggcaaatctgccatcttggacccacagaacagtgagttggcagagggatcctggcatgagaaaccatcgtgcagctgggacctgactcttctgtcttctgtgtggtgttctgagctggggaagaagagagtgggtttccaggtcacagctgtcaggccccacctgtggggtgggtggctctagctctgtcgtcagtggagaagtgcttcaaacacgtcctctttgggaaggtaagctagggatccgctgtttatccctttagctttctgccatcagcaaacatttgagaaactggattagggtgcccctctcacctctgagaaaacagtgtgaacaaagcagcatctcatgtggggcttgatgagagcatctgttgacctttgactctgctacatcatcacgtcccttcctgcttcaggggcaggttgtctgtatccccatttgtgctgctcagcccacactgaagagcctagattctggaaccaaacagtactgccatcagtactttttagccctctgttcttggggcaactaaaagctctgtagatctggggatccttgtctgttaacagctgtgtagtatctactcaaagggctgacttaacactgcatgaaaaatgtcgggtttggtggctagcacattcattgaatccatgttggctcataagggacagtcatactgtgctaccactggggcctgactcatgccatgaaataactgtggttatattaactttaactttccaggtagttatatttagctttttttttcctgatgtttttatttctttctattctctagatgcctaaagtcaacccttggttatcctcaaatggtaacctagtgtttaggccaaaggactaggtaccaaatcttgaaggacttatggtccatatgagtttcttcccactttctcaatgctgttgctatagccccaaaagcagccacacactcatgcaagcaaatgagcaggagatatgcaagtaaagctttattgcaaaaaaacaggccctgtgggtcagcctttgtacaccttggtcaagaatagtgggaacagaagacagagacctgggtccctgtctacctccacctcttggttttccatctctgttcaggaggaagccccactggtaagcaacagccaccagtcagagagcagcagggagacacctgcggggggccatccccagccgccactgagctggggtgggtggtttgctccacaagcagatagcacaaggcccaagcttaaagtcaagatgacatacatttgttggcggagcaccctccaggcagatcgctgtcttgctgaagtgaaatggaaaatcaaatgtgattctgctggccccagtgataaaagcttttgttattgttctcagactcactgtgttcatggagagtttagtcataggggtttctattctcaggaagtcacagcacatcacaatacaaggctcacctgtcttctaaatagttgcgctccacataacagggagggggcaattatgagaaatcatgtgtgctacaatagctgtctaccatcagataaaagttaataaacagcacatatgtggtataggggccaccttgctaattcacaccagaaaccctgtagtcaatcaaggggatgatgtatttttatttccaccttttatgaagtctttgaggttgtgttgatttttgagagtgaaaaatccagcatcctgtcaaggaaagatgaagacaaactggaaagttccatgtggtctgcctcagcgtcctaagcattgttctcttaatgcagtggagtagcctctggaaagcaatcatctcctttgggttgtaaataaaataaatcgagctcaatggttctctttcacgatatagtgactattcctccagtgaagcataatacacggaagctcacccagaggagcttcgcatacacagtggtaatgggaggaaaactattaataataattttttaaaagcccctcccacttgcctcatggacgggaaaccttgtgtgtgtgagcactcaagattggtgacaatgaagttggaatttgagttccagactctccctctgttcagtgatgtggggccatttgggtgcctgtctctggcctggagagacagggtatgactaggggtagctttatgggaaatctaaacctgacaccccagcttccattattacacacacctctcattttctgttgttttccttttagaggttacattttccagtcctggttttaacccctaaattatgtaaattccataggccgcttttgaatacggcaagctggaaaaactctgtaaggcccccactgcctcgcctaacaggatgtggccgcttctctgagccctagctgagcttttctgaggataagacacacttctccctttggtccatctctggctggatcaaggccctctcagttgaatgctgggaacaggaaccaaccttagctctgttagtatcttgacctaaatagtcatgttgaagcctgtcccatgtgctgtggaatgtttaatggtatccctggcctcctctcgttagatgtcaggagcacttccgacttaggacaagcttaagtgcctttagatgttgcatgaatgtcccctgggggctgagaaccagggagatgaattgtgatttgtgttcttttgctcagtgatgattagcctgtgataggctattctcactgcattcggtcatcaaatggaccaagaggctgcaacagatccaattctaagcattccccagcaccacggaaatgacagctttggagatgccaggtgccatgtgaacattggtttctgaagtggttctatcaaggacggccatcaaccacggccaggctaccagttgacttcaggttcccccacccctgctggcaattccttctgtctttcatctgcatctctgacaatccaatggggttgagtgaggtcagttttagcagaagtggaaagataataggataatagatttatgatctaaattaaaattctggctttgtcacagctagttatgtgaccttgggtcagttccttggcctctttgaaacaatcttcttaattaaccctgtctaccttgaggccttgttggcaggattaaaagtagcgcatataaagagcccaggtggaagcaggcacctggtagctctataataaacgtgttctagtactataaactgaaaagggtgaatgactagtgactgggtaagtagaaaggccaagggtatacgggaagtgtcaatggtgacagccggtgactgcacctgactgtaaccaatctccagcttgtccatctctggagcatattcttattgtcagctccaagaatccatctccccctggcttttctctccctgtctctacttctctgacccctggaggacctgatctagggcagaaggctgagaagatgttggtttgtgtagacattcaaggctttggcaactgatctgaacccacatgtgaaaaactagagaagcctctggcctaatcggtgtgaagggggaaaagctggaagacagctgtgtctcagcagtgagcaggagctactggcttggtaggagcaggaggagaggccataggacaggagggatggcagaaggctgccacaacccagggatccaagaacaagcgactggcactcaatatgaacaaccagggagaaagggcccacacttcagcatagccggaagcagaggcatgatggggggacattttttgatcctccctctcatctcccacttgtatatcttggaatctgtgctccgtcaggaaccttgaagacgcttgggccttaactctatgtccgtggtcctgggtaaggaggcggcagaatggcgagcctggtggctgagccaggaaagctaaggtgagattgaggccacagctgggattgatcacccctgaaataggggggttctcagtttgttcctgttgagacttggccagtctaggtctgccgagtccagggctctgccgggccaggctgtctctcagcttttatatcttcactgtcctggtctcacaacaaatgccaactacatttacactctttatgctcttgcttatttactgtcgcccctaaaagtagtcatttaccactcagaaagtcgccctggccctgaaacaataaagacaacgagaactgaacgcacaggacctggaggtcagcaaaaccacggcatcccgcttaaaatcgaacaggcctcattttctgcgtttagaacccaaacacgcacactttaagagatactatttatcatattttatgaggtcaaatcatagtatagaaagcttggaaaatatagaaagaagaaaaaaaaagatagaactaaaaaaaaacattctttaaaaaaatgcacaccacaactcatgaccacgccggcctctgttttcctgggctgggagaaacatgcacttaattttgtaaccgttcttttggccagacagtaaatcacaaacatcccttctcgctgttgaatacttctggacagcagttttaggacctgtggagggccgtgatttatgttccctctgcctacgggacatttagatggctttgacttttgacacattgtgaataatgtccctgtggacttgttccccattcctgtgaatgcctcggacaccacatgtgtgattgtctccttggaatcacctctggcagtagaaatgccgagtgtctctcctctggaagcgttatggacccacgcgttgtcatgcacttcctctgtgatgttttctaaacttcaggcctgtctctgtaagaaagagattgaacatgtgacatcgatacatcggatacctggcctgcagatgtccccttaggacttgcctcccaacctcaaacaccgtttagacttctcgccctccatgatagcatacttggttatgtttccccactcccaggccctgcccactctctgctctccgtgaagatcctacctgtcagttggctctgctattatcctttttggcccaactcatcggagactcagttgttcccaccaggttccttcttcctagtccctgctgcaaagcctgatcctccacaggatggagcaacctccatgctcagagtgagaatcaaagcctcatggcttctggactcagggcgagccttagctttgagcagccctgtactaaggcatgcacacgtatggatactatggatatgcagaactctgggatctgagggtttacagggctctcatgattcaggtgtggccccaggccaactgagaagcctcctggagtcagaaagttgatgccacctccacaatgtctagtaccacctcccttccaactgtgctgtcacccaactgtgctgtcacccaactgtgctgtcactcaacagcgtctcccaagggtgcagttccagtgttgtgagaacactgctgagtgagctgggacacagctactctgctttatctcacaatgcacaccactggaaacatgcccacaagcaaggacagccattaacattattcatacatttacttattcaacaaatatttatcaagtgtgcataatgccagggggcctcaatgtgctttataaacaatcacgaacaaaataaaataaagcaacagatccaagaccctacagagctaatattttaaagacagaggcagaaataaagcagggtaagtaagtcaatgtgtaaaatgagtcctgctaaaagctaagaagaaaaagaagacagcatggagggttgaagaaaggtggcatgtgtcagcaggaggtgtgcagggatcccgttatggggagatggtgtcagaataaagatgggaagtccacaagtaagccagttcagacatgggagaaagcagtggacagcagtgtgaagggggcctgtgctccgtgctcactgtgctttgtgctccatgttctgtgctctctttgctctgtgctccccattctcagtgctccctccatgctctatgctctatgatctatggtccatgctctgtgctctctttgctctgtgctccccattctctgtgctccctccatgctctatgctctatgatccatggtccatgctctgtgctctctgtgctccatgctccccatgctctgtgctctgtgctccaagaactgcaaaagatggagagaaagtaggagaggcccggagaaggcgtgctcagcagtgagcctagcggtggaggctggagagtggcaactgcccacaggcttgaatacatgtgactctgagtgaggtggatgctggtccttggggccaagaactaatgttatgtcgtagcaagcttagcctagcactttacacagagaggaaagacagaaggacttggttgtgggtactgagcttgtgtctcaatggttgagcatgcacaaggctctctctgagtttgactcccagcactgccccaagataaaacaaatctctagaaacaaacagacagacagacaaacaaaatacagtcattttccagcttcctgtacttgtgggttctgtttctacagagtcaggcaagttcaaactttttctaattataaaaagccccaagagtgcaaacctgaactgttgtacatgaaagaatgtctaatagtgggatggatatggagtgatgtgctggctatctttccatagcttccctcccatggggtcataagccggtttccctctggcatccgctgcttaagacagcgctgtggtggtcttgtctgtcttaaaagtgtagttttgttgttgttgttgttgtttggagggaaattccattgtttctaaaaaatgttagacaacacagtcacattagatgctaccagtaatctagagatggccaagtgagtgggacagtatttataggttatatgcacatgccttgccatttttctaaaaaaaattgtttatttatgtgtatgaatgctctatttgcatgcgtgcctacataacagaagagggtctcagatcccagtatagatggttgtaagacaccatgtagttgctgggaattgaactcaggacctctgaaagaacagctagcactcaacctctgagccatctctccagctctctataccttgtcattttgagaggtacctgaacatcctcagatcttgtctccatggggctttctaatgtagcatccatgacggactggacatacacttagtggtgtttgctcaacacactctcactgagctcctatctgccaaccttgtgtggccatactgatgatgagagcgagagagagcgagagagagagagagagagagagagagagagagagcattgtccttcatcaaacagcaagagggctgttccataccatgaaaagagcagttatcagtctcagctgcaggctggacacacccatttgtcactacctttattcctttcacaaacccttaaggtaaatcccatatttccattttacagaggaagaaagtgaggctcatagagggtgcacatagccaagcctactaagtgcctagtcaggatgggctcccagaactttgtttttttttttttccatttttattaggtatttagctcatttacatttccaatgctataccaaaagtcccccatatccacccacccccactcccctgcccacccactccccctttttggccctggtgttcccctaaaaaatatggaacgcttcacgagtttgcgtgtcatccttgcgcaggggccatgctaatcttctctgtatcgttccaattttagtatatgtgttgccgaagcgagcactaagatttatttatttattatatgtgtgtacactgtagctgtcttcagatactccagaagagggcatcagatttttgttacgatggttgtgagccaccatgtggttgctgggatttgaactcaggacctttggaagagcagtcggtgctcttaaccgctgagccatctcaccagccctctcccagaactttgtaactgaaaggccttcaaaccagcactaaacaagcgttgaatgtagctggaagctttctcctaccgttgaactggaaagttcctctctggctgaataaaaagtccactgaaatctttcaggtagcctgtgaggccaccagccacgacttccagctggtctaacttctgcagtgtctgaatggaggatccaccactgttcccaggacccgaaaaccataataggacaagacgctcgggcccattggaccctagagatctctgttgtagagtgaggtcctagacgcgatctcgtaactcacctcctggctctaagatacagtgagtcatgctttgatgtgatcactgcttgacaataccgtttgggtctgtgtgtctgagtgcgcgtttgggcaggtacaggccagaggtcagctctgggcactgtcctcaatttctctccaccttattgtttcagactcggcttctcactcaacctgacgctctctgcgcctgttaggttagctggatgacagtcccagggatccccctgcctctacctccccagtgctgggattatagatgcacactgctcatgacccttttacatgttacaaaatcaggggcttgtgcttgtctgccttgcagtttactgctgagccatccccagggtttgttttttgttgagatctctgtcgacttactaaatgttcccctgaatctgggacttacaggagagataaaaggataaagctcctggaaacacacatctggcaacagatttaaagatgattaaatctgtgattacttctgatccatataatagttcagagatgtgagtgtggtaaggcccaaatgcagagaaaaaaacaaaaaaaccaaagacacatacatgagcacaggaagttgagtggtgctgttcagtagctggtaccccacccagtccatcacctcaaccgtacaatagcctcaggcagtttctggggatacagaatcccccacctccctagcaaaggtaagaaaacgtcagctcagttatttctcccaaggtcttacaccagtgtagagggggccattgtatttattgaatcaaaattcactaccagcccaatacagctctgtagtacagtccaacttcccagccatttgagcccagttcgaaaattaaaaataaaaaaaatccttaaatctgttgccagcatctttctgaaccagacctgaaaattccacttagttgtggctaccacagagggagttagacatcaggttttgctgggtagccgcatctaccctcctcccccccacacacacccatttttcataagtcaccctttcccagttgggacccctgtggggcagatcaggttgcattctggacacaaatgagcatgcgcagagctacagacacccctgagggtgtcatctgcatctgatgggggtgagaggacagtgaatgccttccggggccacccattcttgataaggaagcctaacagaactgcgtctgtggagaagagtgcagaacaggaaacatctggaattatgagttctgtttgtggtgggtgtgggtgcatcatttgccgcacctgacattgctaaagccttggtgtcataggagctttggatagagatggtcagtaagagccttctggggaaaaaaaaaaaaaaagacaggaattaaatatggagctctacgttaatgctgtcagaaccaaatgctggtagttctcttctcagcctgtcagtcaccacctgcccacctctcagctatgcttggaaacccaacctcctggcatggtcgagcatcgtttctgtcatcagaggataagggtgaatgaaggaagttatgggaagggaatgagtggtggaagaaggaattattgctaaatccaacccaacccaactcaacccaacaaagtaacttagtaatgaacctggttctagttctgaagctagactctcaaggttctaatctcaggtctcctgcttgcaaatgtgtaaacctagacaagctattctatgctgagcctctgcacccacctgtaaaacaggcacagtcccatagtcccacaggctaaacgctagctctggcctcatgtgaggagcaaggaaggctctaggctgaagagcagctgataatgtagactgtgcctatgaaacagacaggggacagatggagagagccaggagctgggagagaatggagatctgagggaatgaggctgtgtggggatggagaacaccaggagatactttctacctgctaggaagaagaattgcattcactccaaaaaggtactctggtcccctcacacccctgcctgtttccctctccgcagtaggctctgcagcacccttgcacactctgggacccagtcctccagatttgccatcacctggtgtccttggacaaagcaggcacggggttctgcctccctcccccaaatacccaccgagggatccctgtgagctgggtctcagtggcttcccatcgcctgtcagggaccaactgccagctagggaagaagactgagggaaggggtcactcagctgggttagctctggctgaggagaagctgcaagctcacctgttttctttcttctttcttctccaccccttcatgaacacacaagcttctgaagtgtgctagctgccaccgaccttcatctctgagagctgtagaaaacactggacctgcagaggttattagcagacagcgggagaatgacagagacttgagggttcctagtaagcttggtactgcaagggttaggccctgtacctgaatcctgatccatctcttctgcttctctgggcccctccacaagtgaaccttgagtggcttagtatgatgacatattaggatatttggtgcccaagacaatgacatggacttctaatattttcccctcagatttaaaagtttgtggtaaaacacacacaacataaaatttaccacattagccattttgggtgtacagttcagtggtattaagtacagtcgtttggttgagcaactgtctctaagcctcttttcatcttgtaaaactgaaaccatacatccaccaacctccagtgcccgccaactgccccacccccaactcccattctatgttctgtctctatgattttttgacttccctatgtatcttgtatgaacagaatcatacagtatttgaatgcttgaatgttttcttcttattttagcatattatccgtggggccctatcttgctttagtaggtgtcagaatcttcttttaaagactgaataatgtcccaggtgtatttacagatcccgtctggcttggtcacacaccaagtgatggacacctaggttgcttctacttggtattgtgaggaaagtgttctgagtgtgggcagacaggggtctgctttccagtctcttcagatgtgtactcggaagtaggattgggaggtcatgtagtagttgaacttgtgcaagaactggcaagctatcctccacagcgactataccagtttacatccctaccaggagcatctggcacagcagtttctctatatccttgccaacacttgcttctgatttcccatcctagctgctctcgctggggtgaagcgatctgaacttttgaacagaaagaaacaggcaaagtaaaggtttccccttcagtgccagcagcactcaggaggcagtcgcagtctcggggggggggggagtttcatgagttcaaggccatctggtctatatagtgaattgtaaaccaaccacgactgcacggtgagggtctgtcaaaaggaacgaagggacgaaggacctaaacctggcataccattttaacaaactaatcatattaacacatacaaaaatatagtaactgcgtatgcatggcccttcagagacaatgcaaaaggagggaagggagaagatgtgtagagaacaagataagaaaaattagaagttaaggtgggtaagaaaaattaaggtggcgcagaacggtgacaggctctgaggacagctttgcgacagcagttgggggcagcccaactctgagtgctggaccctgtttgcctacatttgcctggggaaactgactgcttccagggcaggagggtcctcaagagaaacaagccacagatcctatttggggtcagaagatcaaaatgggggaggggtgattggcccctaaaacaggtttgcctcagggagcagaaagcaggcttccttggtttcttggttggcctggctgccccttgtccctctgcagagctagcctctgtagaggccaaactgggtggcattcaatcttgggtttcatgcattttttaaacctgctgttgaaggagcaactgcatcaggcagcccttttatgtcagggaaaccgcctgtgagaacgggggaggtgatgggggcgctgagctccaaggggctgccctgggcctttgtttcaggaggccgcacaaggcggctgggcttttcctttgaaaacccctggccaggagctcaagagcctcttttctgcacaccagctacatcacattttacaaacctcaaggaaggggacccagacctggttctgtagtagtctggtttgtgtgcctcgagtctccgacaccctcattttcttggtaagcacagaatgtagggaatagcagtgttttctcttacatccctgcaaagatttccctggaatttcaccaccagctggatgaatagaaagaaaagggaagcaggcagactaaatagacggggcatctcaatggcatgtcaccgcctcacaaagccggcaggaaatccttaattaaccctgcttccagacacaaagcccccataacatttcatcccatttgaataaatatttttaaagaaaggaatgtgaaagcacttttattcgtggtcttggagcgctaatttagcaccacgtgtattttcaactgtcccacaaaagcgcagaggataagggagttcttccaaaagccctcctcccctcggtttcatttctagtccatggtgacacatccctcttgggaaaatcctggcccagattttattagtcttttgtcagctgtcgggagttaaaacttcacaaatccagtctacgcctcagccctgccttgcaagctgcctgcctccccatgagatgtgggctaatggttgggaagagtcaccctcatcgatcctggacacagcaatcagcccttccttccccccaacccagaaacctaccctgtgctcagtagcccctggcttccccgagctgctcctgaggcactgaaagcaggtgtgcacacgcagaggtgtttggtctcctctagcacaggtctgtggggtcttttttccaaaaggtttcaaaatcaccattatgtcgattgacagtgtttctgaccagctttagttgagcttccggctctcctccttggtccatgtgtgcttaataaaaccctgagactcttgctaagtcaatccagcaagaagctcacacttgacacctggtcacactcaatatctcagaatccaatgagccccgtcttccactgtccctcaggggtgcctcattttgtcttcagctgggatcctgtgacgtcagcttagccagaatctctctctcactcctgatatatctttcttagtaattttccatccactgacccctcctgcctgacgtcggactatacctgcccacctgcccttactgtggtcaagctgagccccactgctctttcccactgaggagcccaccaaagtggtcctttatctgtctaaatggcctgggtaaagtcactcttattgttcctcaacaagggtctctgagtaatttctctttaacgcatcctggcaatcattattaattgtttttactaagtatgatgataatctctgatagctatattctgaggtccattttataaagtgatctcattatgatgtcatttgcaccccatggaaatagtgactgtcctttcctcctgacagatcaggaaactgaggcactgagtgagcttcttaagagaacaaagcaaagattaatattatggacagagcacgtccgtcttttttaacaccccataggctgctccttctatgacatgctgtcttgtcgtggaaagattccatgatgtgccaacggaagaaaatgagtcagacccacctaaaagacggtgaccctgtggatttgagcttccacataaaattaatttgtactgagtggtggtggcgcacgtctttaatcccagcacttgggaggcagaggcaggtggatttctgagttcgaggccaacctggtctacagagtgagttcctggacagccagggctatacagagaaaccctgtctcgaaaaaaaagaaaaataaataaataaataaatagatagatagataaattaatttgcacccctgggcaagagcagcgggtctgggtcacagaccgaatgaggaacacccacccagaggaagggcctctggcttgtctggccgcttttccacggcaccacattctacgctgacaaacctggcggaagagggggatcccagtggtcagtgttagttagcatcagagtgctttcgtgggcatgtgtgtgggtgttgctgcgctgaccctcccagctgagagcaaggcttgcaagacaagaaaggatgtggtggcagagacaagccttctagcgtgggaaagtgatctgtgtgccattggtggcatgcctgccacatcataggctctgctgctgtgctctgtggtggtgctggccatggggggcggggcctgaggacacctgcgctcagacaagaagctggtcaaggggtggggcccgaggacacctctgctccagtcttcagttaatttttagttttcactttactgtattttcccacaagcaccctgagctgctcccccagagcaacccctctagccaccctatctcaggtgtgccatggtgcggaagtgacttgcctatgtcccgcggccccttttctgcttcggtagcggaatctcagggactcctccctagctgcagtgattcgggaaggtcctgtatttgaatctgatttcttatttgaacattgagggcactgggtgtaagaaccaaaagagtttcttgttctgtgatcagaatgtgtctccttctaccccaccggcttctctgtactgctcactggaccctaagcatgcctctgctctcactgtgtcttgagagcagagctgaggccgtttgtccctcagagcatgggtcagagggacagtgtagacggcagtgtgacatggaaggatgcttctagaaggtgcctcgtgtgtgtgacgccctctccagtcttccagtagctctggttataactgggctatgatacgtgggggctggagacagagctggtaagaagggtcctaaagctccaacctctttgtccaacctcattgccctaaccaccttagaagccatggcagatagagactgtccctagggtgcctgccagcagccgctgctgccagtcaatacagagttcacaggagaggcatgggcaggataagccgcttcccgtctgcctgtccactttgttctcattcagccacgttgagtcgtaagcattctcagctcgccaaatatttactgagcacacagtccttgtagcacccaggcagagtggagacaggcggagtctatccatcccatgatgggatatgctgctgctcttcccgaaggcttcctctttataccacaaggttcccctggagtctttagaagggtgtgcacacagtcgaaaaccccaaggcaagggtgagcgcagtggagtgtaaggagccagctgcttctgctccccatcgaggctgtggctccactcctcctcactacagggcaagcttaggttccacagttatatcctgggctcctcaaacacccaacacccaggttccaccaacttaagggataagtctagaagagtggtgggatgcacccaaatccctcagcctctggctgaaagaaaaatgctgtcccttctgatcttgcctataaggcctgagtctgtgacttgtctaacccctttttaattgttttccttacattcttttaaaacttcaaatccttctaatgggtgccagcttccacttgttctatgggggtgggggacaggtggaaggtgacagcccctccaggacctttggcccttgatcactactgcacgtggtccaggagctgaggcaggggcattgtggctatggcccccaaagacttgccacttgtgttttcatacagtaaagagggctgctgcctatggacgtggcttttggaatgtttgagccagaggctcccagaaccttgatcctaggttctgttctcctcaagggccaaggaatacagaaggaagcctcagagagtcaggcgaggcctcgctgtcctcaagattgagctcagagcagcctgcatagccacaagcagttctcagcagcagaagcaggaggaggagggcagatagatgggcacgtgtctgctcttcagagatcaaattgtctctgaaaggctaagcagcttccaaagaaaagatggaatcaaaggggtgtatggtccatgcctgtgcttatgccaagaaggatgtctgaactgtagctggtacccccaatggcttccagcagcccagcagcagcccagccctcctccctggcttctcacacaggcagcagaggcagagctgcagagctgtgagctgctcgctgcatgcagtctgggcagctcctgtcagaacgtgacctactatcactgagaccagcccagtggccaccactccttgtgtttctcagatagcggcttctgaagggaatttgtgtgggggaggggagagagagaagacagcgcctctcttggtctcagtgaatggcctcaaattctgatccaaagactgcaggactgatgagatggctcagaggggcagtctgacatcccgagttcaatccccaggacccacaaagtggaagggaaggttcattttctacaagttgtcctctgactgccacgggtgtgctgaggacgctcaggtctccacgcataggtatatttttaaataccattttaaaaagagcattacacaaaaatattgagttgtcaagggacaaacctgttgtgccttttactgttgcaggggacacggacctcactacacgctgggcgagtctctgcctactagctatgtgatcttgagcaagagacttagttgctctaaacctccctttctcagcagtaagacagggggaatgaggtctccctaagcaagctctgaggatgaaatgagacaaatgtttatgaccagagtgcagggggtggggtggggtgggggggtgggggggccacacaagacagggatgaatatcagcttccttgtgggaaaaacttgcacgagctttctaaagggtgtgaggacaataggtccttggtgggaaaataggaaggaaagggtggttacttttcgggtccccgagagacaccctgattgtctcactgactgccactacagtgcatgacctaataggccttgggacggtcatcttggacacaacccacagaagctccaattggattaaaaatctcagaaatggtgggaatcaggacctctcatctcagcttagcatctacccttgaggctaacttggacctagaggagtgggttccattagtaaaagaaaccatctcccatccttctcctttcccagggctgtgaagcgtaggtcctctagaagaggcacagattcctgggacctgagtccagacggattccttaaagtctttctctgcttgtctgtggatgcttggagacccaaccagcctccaagaggctgttgcctctcttgttctatctgggtttcctctggtgcagtgttcttcctcctagcttgtaaaggtcaacaagtggcccagctgcagaactcatgcttctagagagagcagaggctaaaacagacacgggaagaagggggaaaggaaacaggagtcaaagcagagtctgggaaccattctgagaggagagaagcccactcaggccattcttcagaagcaacattcaaaacaaacccaggagaatctaagacatggaaactttgaccgtagtggacttcagcccagcaatggggaatcctgttggggagaccaaccatgtgtgtgtgtgtgtgtgtgtgtgtgtgtgtgtgtgtgtgtgtgtgtaggtgtgcatacatgtgtgtactgccctgtgcctcagtgtttcctataaagaaagctaataggagtacatgacttgtctccataagacccaatagactgatgactgtaacatggcccccgttgcctttccctagggaagctggcatcatggtgccatttgacccacctggactatcacatatctatcaatttcttaagctcctgtgctcacagccgtttgtcttgtgaactttgtacctgtcaagtagcttccagttctaaaaaagaattaagacccttcacacaaactaatcggagcaatcgttctgcgttttttctttcactcttaacctcgcccaatgcgagttcaatgtctgcttactgaagtctcgctcttacctgacaaacagatttcccaaaacaaaaacttttgaaagcaaatgagtgaaaaccatttcagcagaggctttcgcttcacgtgcccatttgaaacagaggctgttcctaagctgtgtgtgctaactataaacatcaatgacctttgagcgtctcctagcagacagtggttctgatccagcagacgaggaattgggcctgagacagtattatacttaatctctctattagctttattgttgacttcaagttttatgtaactcttataagttacaggtgatttttttcatatcccaagaatgtacaagacctcagactggggagatggctcagtgcacaaagcgcttgtcactcaagccaaacccgagtttggcttccagaacccatatgcagaccagacaccgtagcataagcatccggtatcccaacgtgctcatacagaaagacagaaggcaacaagaggcccatgggccagccagctagcatggtgtatgtagcagagatcctgtctcaaaaaacaaggtgaaggctgagaacagatacccaaggacagcatctgactttcctgcacatagcatgatacagacacacacacacacacacacacacacacacacacaccttcactcaaagcaaagcaattatagacgaccatagaccagatgaatgtctcataaccagataatttcaataacaaaattataaaaatactctcatctttttaaatagctaaataactgtcttctgtgggtggaacgtgtatcttcatatttatttaatgcagaatggctggaagactcgaaaggctaaaaggtcctgctaaaactgtcttctgaaatatcctcattggttttgaactgaccgaggaggatagcccacagtggccgctgttcacctgcttcagccggtgtaagaactcccgagctgggcttatgtggcttgataagatccagtattggctgttcagctggaagagcatgatggaagcccctatgtcagggaacagggtaggaagagggtgctcccagacttgtagcagcatcaggtggtcacattcctttgtatggatcccagcatgggcctatattaactgggctatcgttcaacaacttgattctcagagcagcatgaggaagctgtgtttcctttgcctctgagcaaatggtgtcttaacaatgaggcactgacaaatctgtcttcactggtggttctactgccctttaggcatctcctgagtgttcctttgcggttcttggcttctgcaaaccttggggctaggacatcagaccttataaatgggcatggagtgacaacagtgtggatggagcatggggtgacaacagtctagatggagatgtctatggactctgaacatggcttcagtgccaaactagatattttgggttgagacgtgagttacaagacagaagttgaaaatgcagtcaagaaaatcagtcccagatgaaagaggcaaggctcagcaccatgaaaaatgaatgacagccatgccaagttctccgcttcaggtgaagagtggacatttgcaggagggccagtgatgggggtagaagagatagccttgactctgagggacactgactgagggaatggtgacattctaagtagtggaccaaaaaggtctaagaatggagagggcaagtatcactgagttcccagagaagtagacatggctggcaggaggggacattaacagctgacatagtggaaaatagtctaaccatagtgagaggccctgaagccacacagtggggtgggggtagatattcaatgtatgcaaaaccaaacctgtgtgcctgggtggtttgagcccagggagagacacagccaccaccagaccgagctgtgcagtgaatgcaggtagaagtgtcccatcagataatgtcaccgatgtgtggtcacagcatcatgagtgtggaagcaaggctggcaggtatctggatgcttctggctaatctagatcgaccacctttgctttttagtttaatttttatttccagttagccccaccataccgcacacttccattctcaaaacaataaacagagttcagaaaaattctaaaatgccaaagagaatacagaaacaaaccatccatcaccagggtaaccacggctgccaaagtcacctagctcatttcagagtttatttttatatactgctttaaaaacaaaccaaacatggttggaattcgcagtccaaccagtcaataaccatgcgggatgaacattctcacagccaggatggcttaaacctttttagtaactggaggacattttaaggtagactttacctgtttgaaatagacaacacattaaagaccttttaaactgaacaaacaaacaaacaaacaaacaaacaatttttcacttatgaagaaataaatcaagaaaacattcaatatgaaaaactaaaaaattaggtctctttaatcttattgtctgggagtcactagctctgacagtttggatattatcttccacaataatgctcattttgagaaaagaagaaggaggccagtggcacctctatacagtagcaacctctccgtagtctgagctgggaggatctctgtgagtctcctgggtttggggtccgcctgggaatatagtgagaactcacctcaaaaaataagcaaatgaaaatagaaaccaggggctggagagatggctcggtggctcgaagctcttgttcttccagaggacctgagtttggtttccagttcacatagagggtaggtcacaaccacctgtaactccagccccaggggatctgctgctccctctggtcaatgtgggcgcacacgcacacatggcagaccccccttccccactccccacatatacataattttttaaaaaaacctttaaaaactaaaaccaaaatcagagtcacagaatatgccatttggatcttgctacttttgactactaaaccatagaagtttctgttttctcactgtggtgtgtctgatattaatctaacatgtattgattagatagccccagccgagccattcaaagcatttgacattatattcattcatttgatccccacaacaacctatccacaaaagtgccgtgttttttcttcttttcacagatagagtaagaaaggggcaaggtggggcttgcaggcaggccttccttctgactctgggtctgccctcctctgtgtatttctgcctgctctttgtggtgtttctttccatttccagctctgttccaggggtccccacacaccttgtggatgcccctcccccatcacacatatacacacatgctcatgcgcataacacacccaacacataagcccaatctcttctttcatgagaagtctttcaaatatgtaaccattttttgaaatctccaagtccttaggctttacatccagtctttagggtacaaagaccctctccatgttggcctcttgagcaggtatgattgtttttaatgtgggtagctagatataaatgcatggcccaggttgttgaagctggtcctatatcatgtttaccagaccgtaggtacctgtcaggactggcttttccatgagctgtgctagaatgcttttatcacatcctcttgtccccagagctccatggctgatcctgcaaggcacagccagggaggggagaacttaggagtgtccagagaccatagctggtgnnnnnnnnnnnnnnnnnnnnnnnnnnnnnnnnnnnnnnnnnnnnnnnnnnnnnnnnnnnnnnnnnnnnnnnnnnnnnnnnnnnnnnnnnnnnnnnnnnnnnnnnnnnnnnnnnnnnnnnnnnnnnnnnnnnnnnnnnnnnnnnnnnnnnnnnnnnnnnnnnnnnnnnnnnnnnnnnnnnnnnnnnnnnnnnnnnnnnnnnnnnnnnnnnnnnnnnnnnnnnnnnnnnnnnnnnnnnnnnnnnnnnnnnnnnnnnnnnnnnnnnnnnnnnnnnnnnnnnnnnnnnnnnnnnnnnnnnnnnnnnnnnnnnnnnnnnnnnnnnnnnnnnnnnnnnnnnnnnnnnnnnnnnnnnnnnnnnnnnnnnnnnnnnnnnnnnnnnnnnnnnnnnnnnnnnnnnnnnnnnnnnnnnnnnnnnnnnnnnnnnnnnnnnnnnnnnnnnnnnnnnnacacacacacacacacacacacacacacacaccacaccaccacacagagtttcatacgaagtcgttagcagagggcatatcactcaagataatttccatttgtgaagagacactggaagaccaccgagcacagtacctccatccaaaggtattttcagctggggaagtgtcctctctatgtcgcctgatgtcacgttctcttgtattatgatcattgactctagccctctggaaatataagctcccaactcaaagctttttttcataaatggctgtggtgatggggcctcttcaaggcattagaaaagaaactaagatagatggattcacagacagcatgctattttatcctgacaacaccctgtgaattgggtgttattgcttccagttgagaagtggggctaaacactgctgatagagggcgcagagctcagggagggttgagagggcacacaggggaccagatctttctcaggtgcttcagagggacagcagaagccagagcatcagagccaggccatcaggctggtcactcgtacctcaggggcagtgacaggtccctggaaaagctcagtctagatagttcagcaaccatgtttagcttctaaacttatcacctaaaaggaaggaacccaggtcaaccttctagggtaacttcctttgtttgagaaatgaaagtaggaaaatacctaataaaaaatattaaaaaagaaaaaaaaagtggggggggagggtatgggagacttttgggatagctttggaaatgtaaatgaggaaaatacctaataaaaatattaaaaaagaaaaaaaagaaatgaaagtagggctagagagatggttcagtggttaagagcactgactgacttccagaggtcttgagttcagttcccagcaaccacatggtggctcacaaccatctgtaatgggatccgataccctcttccaatgtgtctgaagacagctacggtgtactcatatacataaaataaacagttctttagtagcatctttgttgtccttattaaaaagaaaaagaaaaccactgtagtgtgtgtgttgctaaaaaaaaccacactaatgtaatatgttgtaagtagaatcccgaactaggttccagactccggggtttcctacatgccaagtcaggccactcaccccagagagagcaaatgaaggcaggaaggagcttacagtggtcttctgaagcaagacagaaaccaagcatctcagcctgtcttcagaggagcaacaggatcttcacatttgaacggagggagaattccatacacaattaggcagtcttggagaggattgctgtcacagctctggttctgcaaggtaacctcagagaagtccttgtcaagggaacaagccaagtgccattgctcctgcttagtcctgacctcattctggggtgaccagtctgtggggcttctctgttcctgaaatccaaggtgagtgaaggcttaggacaatggctggagactctcggatgcttttaggggtctggagcgagttataaaagctgacaggaggatgcctctgttactgttgcatttgtgtcttcagccccaagcagggatagctagacaggtatcactgatctttgggagatattccttaaacaattagcatgcctgtgtgcagaagttagtcaggaatcaggccctaagtgaaggacagataaaaagtgaagatggagatctcacagctcatcctgctttttgttgccctgcaggcccaagggaggagttggtgctttttttagcaagaagattcaaaacacctgttacaataacaagttttgttttgtttttgctttttgagataggctcttgctaggtagcccaggctagcctcctgcctcagactcctgagtgctgggattacagtcatatgccacacatctagcaaagtttctttttaaaaagcatgctacagccgggcagtggtggtgcacacctttaatcccagcacttgggaggcagaggcagctggatttctgagtttgaggccagcctggtctacagagtgggttccaggatagccagggctatacagagaaactctgtctctaaaaacaaaaacaaaaacaaaaaagcatgccacaacaccattgtcccacatacagaatttacaatagtttcttcagatcatcaaatgtctacttgatggtcagatgatttttccaaccatcttattcttgtctcttcttaccttaccattcgtttggcccagctgacatatatttttctttgactcttgaatatctaggctccttcctgcaccactcacccacttggcttcccctttgttgagctgtattcatggaggaagccaagttgttaatcccacagagtttcccacagtctgcatttcactgggtgcacacctgagctgttatttaactcattccttctttcccccttgcacatacacatggagtcttgaaacgactcaggtttgctgctggagcaaggatgctagaaagtggtactcttctcctgaggcttacggcacatcacacgtgttttcttgtgatgataagagccaatgacaaccattgcatagaggggctatctcattaggaataagctatgttttcatttgggggtagaaatgttccctccttacctgtttggctgccctgatacatgctcagggtaaacgctagattcctttcctttatctacaatgacttgcttatataaaatggattcaaaactaatgctgggcagagggctctgttgtgtgagtgtggacaagagtagtcatccaccgctcattcttgatactcagcggtggctgtaactgtacttgtacaattatagtgttgtataattatattgtacaacaattgtattgttgtccttgtgcatttgtttaatagttttacaatttgagtgatggttgacagggaaatcttaagcaagcaaacaaaaatgttccccatcaccctcagaggtgaagtttcagggtcatgatgaatgtgtggacttaaatatacctacatcacttaatatactacacacagttcctcatcttattgatgtgtgagttgttccaacattggctactgaaaaattccaaattgtacatgtgtgctggaggggtccacctatggggacatatgtgcatgcttgtaagtgtgaaggccaaatgacaaccttaagtatcctccagttagcatccacctgtcctttctgagcctcttactggcctggaactaatgaaatacactggctgactaaccagcaaggcccagggatccacctgactccaccaccgcagagacaggattaagggtatgtgccaccaggccaggcttttatatgtgggtcttggagattgagcccagtccctcatgcttgcagtacaaggcctttgctgactgagctgtctccctttcctcttctccctatcaccctctcattgttctagcacaactctagaagtgtttgtgagcatctgtgcactcgcatgatgtggctatgccatgcctgttgagcatttcccactccagtgtgggcttggccaatcctccaaggcctggctgttgtcttcacaaaggttctctgtgtgcaggactctcattactccttctaggcccctgctacctggaaatatccttgagactccagttaggtgtggtgaccaggagcagaatttttctctccacatagcaagcaaatattcctttgccaccctccacccccactaccaccacacgccacctcaaccaagcaggtgtgccaggatgcgttggttgtaccggtgggtgggtggagggaaaggagattagaatctaactataaaggctcaggcagtcactagtttgagactggctccccttccccagcccgagccctgcccatagccacggtgtcagtacagagagggcagtgagtgtttatatctccatctatctagaatgaggcaggtttatctcacaaactaaatcagaaagaaacttttaggaagggagcaataggctatctccggttcctacagctctgtctaatcagccgggggtagggtgggctgcacagtgcaggtagagatcctgagagataagcacaggctgaaagagagatagaaaggaactgcccagattaaatgggtacagctggcgaggccacacagacttgggagtcctgggtcccctctaccacactacatacacatccgcatcccctccgagtcaagagtcacctattctgcaagaagactgtgtatgtctagtcagcatatgaggaacttcttcttgaacattcttgaacattctagactttgcagagcacacacacacacacacacacacgcacccgcaagggaaacagccccacatgttgccactgggtgactttgcttgtcatcatgaggatgggcgagaaccatgcttgttctcagaacagtgtccaagtccaggctgtagctgttctcaggaggaagtggacagacaggcctagaaaggaggagtcagaaggggaagggaggcaatggaggtgctggggcatctggtcaccacccggaggtgggaggagaaaagctaatgaggtgttcagggaaaggctttataattgatcttctggtatactgcagaggagatgcctgtgtgtaagggatagagaaaccagtggtatcagatgcctaaggagcagatgttggtcacccctctgtatatacacatgcatgtatgtatgtgtgtatgtatgtatgtatgtatgtatgtatgtatgtatacacctggggaaggtgactcaaccagaacagcatgggctgtgggaaaccaagactcagagcagagggacccatgtgtgggcaggtggcacagatctgaaccaaggcacagtgaatccttttaaaggcatgcaagtcgctgggtcatgaggctgttgagtcaggcacttatggtgggtaaggggtcacacagacatgcaacaattgtctttctcaagagtttatagggattggggtacttcaatgggagcgtgtgcgtctcgtcttgggttcaatccccggcaccagtaagcaaaccgtcctctcaaaccacttatacaaattacacctatgttataaatactgtatgtgacctatgttgtaccacacatctataacctgatgtttttacaatcacatttaaaggtgtatgcatgcgcatgtgcacacgtgcctgctcacacacatgaatgtgccattggcatggatgcggaagtcagagcacaacttgcaggaactggtttctgtccttttaccatgagggtcctgggtcccaaacccaggtcttcaggcttggtggcaagcattcttacccactgagctaacttgccagtgccttaatgacatctttgacaatgccagaccacacggatgccactggaatcatacaattatactaccgagagatgctgttgcgaccttatctatgacattcccctaaggttgaaatcattgaacaatgcatttttcagaattagccctgtggtgtgtcacatgactgccctgtggtgtgtcacatgactgccctgtggtatgtcacatgactgtctacacatttaaacctgatgcctttgctcccatggttttatttctttaaagaaaccgagtgatacacaaggtccaggaaaccaattttatcagaagccccctggcatcctccctgagccagctgtgggatggcaggcctgctgccttacgcctggcagtcttgacttttgaattttactgtatttaaatagacaaggaaggtccttctggctagacttgcttttctcgtgtcctacagtctgtgcacgtgtgtgcgcatgcatgtgtatgtgcacacacgtgtatttacacgcacaaattcacttaacaagagataacctgggctcctgccaagacagctctctaacttttgtttcgggacaggggaatctttgaaacaagtgttcccaagaaaacgtaagtgaacacatctttgatctcaaaatgaggaaagattttctaagcctacaggtagaggtagagggggaaaaaagaatctcctaaattacaatttgcatgtatcaaagataccaactgaaagatagaggtaaagagagaccatcttaatatatgtacaacaatccctaatatgatgggaagagacgaatagtgccaagcatgtgcaaacgtccatccaggaagaataagcaaagctcatggccgtcagattcataaagtgacaactgcacagcaaagaacgcgtgaaaaaattctccagcattattggtaagccgatgcccattcagggttagatgctgtgcttgctcactggataggctgtattactttgttgtttgtttaaagatactacccagggttagaaaaaatatcataaaccaggttccttcaaaaactgctctatgtacattggcttcatttaaggggtctgaaaagcatttccccaacttgtagctacatgatttcgtgactcttaacttgctcttttttttttttaagtttttagaaattgttttatgtgtgcgaatgttttgtctgcatctgtctgcgttcctgcaccacatgcattcctggtgctcacagggtgcttgggaggtcagaggaggacagtgcatttacttgttagtggatttagagatggttgtaagttaaccgtgggtgctgggactccatcttgaatcctctgcagaaacaagtgctcttaagtgccgagtcctctctccagccctgttaatttatttttaccaaatagggggctggggcataacccagtggtgagctagcaaaataaggccttaagtttaattctcagcaatgtaggggcagaaaaaaaatcacagagagaacactgtattcaaggatgtttactgtaacacaataggactaaaaatccatttctaaaggcacagggtgactatacaacaatatctccagacagtaaagagcagaacctgtgaggatgtggtcccaatctctaaaaatacattaaagcgaaattagaagaaagtatcaaaatgttaattaacagtgaccacatttgaatggtgaggtcatgggtagactttagtttcttttttgcactttccagtattttacaatgttcctataatcggtactttttaattccattatcagaaatgctatatagagaaaacattgaattccccccaattttgaattaagaaatcaaattcttcctagtatattccaagaagcaagtttggtggtgggggtggggaggagatgctaaagagaaggcaaaggcgtccgtctgatagagttagagatgtcttcgtttgtgtgtgaacactctgcagcctccattctgtctaagtggatggtccagcctggatttccggggagagccatcgctgcagatatgaagactaaggtcaacagcacacagtaggtattataaagccctgaggatgagtgattgagatcccaaaaggagtacgtgtaagtaggtgagaaaataggatgagaaatgagctctcaagtatctctccaagcagtttggcagaggcagagccagcagttggggagatggcgcggtatggtccaccgtctcagccacaggcactgggcaaacattctggagtgttcatcagatcaaatgaactctgaggattacttagtctaagatcttagattttggacatgggtatttgccttcatctagccaacttctttcgggcctagttctcatgggtaatatgcgtgtgcgcatgtgtgcacatgtgcatgagggtccacattgttcttggtgttaaaaagccatgtcaatataacacaaatgatggggaaatgcagattcaatgtttgagaactgcttgtgagtgtgttaactctctaacattcacaatgaccacactgggaaggagagtgctaagaggcaggtgtctgaacccccccaccctccaccccacccccaccccgaattctccttgatgaaccgccttagctggatcttgtatccgaagaatcagatgagtttccttttttttttttttttaaatttgggatctttttttatttttatacacatgacaagattttacaccaatagtcagttaaatagtacaaatttacattcaggaggaatgtttaaaaaaaattcaacaacaacaacaaaaaaaaaaaaacacttcttcctgtgacccataatcgcaacattttacagtgcaggggagaaggaggcttggggcagcatccaaaacaagtccgtcttctggttgtggtcatgagccttgcaggcgctcagttcagcttggccacgtttgcttaaatggactcagccccacaattgagtaaagctatctcgtggattcctttttgtcttggttgttgattgtggctccaaggattgaacctagaatcttccatgtgccagggaagcaccgtaccactgagcacaccacagcccctccatttgtgaagatctatttcaggatcagatcccagtttttcagctatactcccgtgtgctgcgtagcagttgcctcttctttagggttggaacccaggccctccttcccttatgaagaaagagagcacctgcttcatactttggggagcaggggctacttgactgtggttgaactctcacagctagagattttaattacaatttcagagaaggcacaacttagtacggacagggtggaaaagaaaagtgagtgtcccttggcctaagcttcccttattgggaggaagacacggaggttagtgagactttgttctatggggctggaccagggtggtggggctcactaggaatccagagtgcactgaccgaggctgagcttgagcctgcctgcctagggctcttggctcccgaggaggctggctttgaggtctgcacattacactgatagatggctgctccgtgcctgggagaggtgttttggctcaatgtcagggctcccatcagaggagcctgagctccaaggggtttgaaaaatggcttagatgaaaaaatggactctgttcaataataaattataatgatggtttgtatttatagggcatcctcatgactgagggagttctaagttctttatggatattaacccacccttcccgcaatagagaaaagataattttatcaattcaatatcttttgaatctcctctctctccctgctcctgccgtaagaggatagctattacagcgatgttttcttgtattaatttggaggccataaatcttcctttcattttttttttctctgctggaatttttttttcttattggatatcacacaaggaattaaaaatgaacagcagtacctaaaatgtgtgtgtatgtgcatttatatgtcaccctgcgtgtagtatctacataaatatttaatctttatgggctcgggcttctctctcagttttcatgagctggaatttattatctactgaaccaaggagctattattatttgcttttgcacctaaatgatttaaaagtcaattataaattggctaagggaatttgagagccgcagcatgtactatggctcctatacttcgatttgtcaccaaatgtctagaatgaggaagtgtctacggtgggaaagagtctaacagagagccacgccgatattaaactgaccagacagtggccccaggtcactggaatatgagccactctgctgggtttcatttgggtgagttagggagctgaggaggtgatggtggggttacacactcagacaaacaactctgaccccaaagcaggaccccaggacaacccaaaacaacccctcaaaagcaggctagctccaggaagagcagtgggagggaccagctgggactgccaggtctgagcgatgcaactctctcataacaattagagccagcatcagcctgcttcccagtcccctgggaagacgtgtaaacactgaatgcattttctatttatctgagccgtgcaggctggaaggtggtaataaccattacaacagaattatctactgaacggagaccgcctctatggaattcacgtcctccgaccgaccgctcgaatcctctgggaggttttcgagtagcaaaggaacagggcagaaggccacctggagcactaggagggttttaggctttgtgtttgtacgaaaggctggaaaaaaaaaaggagttgatgttaacctcggaattagccaggagcgaatggtaaatctttgttaacaagctcggagccctcaataaattttttaaagtgagagtgcacaatgagcgtttgtaataaatcctcagtcgcctgtgggttctggtttggagctgaaaagtacttctggaacaagagccggcttctcggatgcctttgcacgtttaccgactaatcaaagtgtccagcggtttggcttgtgtggcggttattaccaatctaacactgtgagaactgaaatggctacaaagcatatcttatacacacatgcacacatgtacgtgtgtgcatacatgtgtgtgtgttgtttacttatatatttgagtctgtgtatatggatctgcgtacatatccacaaacacttgcaagcacatccgtatgtgctttcccttgtcaatgtaactggatttattttttttttccttgaaatgttttgatcatgttgtcccttctcctcccccaactcctcctggacgcccccacctccccaacctacccacctttatcttcttttctctctccttctctctttcagaaacaatacaatataatacaatacaaaataaaagccaagcccaccataacacagatcaaaagaaataagcaaaagtccaataagacaaaaaaaaatgccaagatgaaacaacaagtttacagataaaacaaaacatggagttagtttcatgttggccaactaggcatgaggtctgctcaggagtgtagtggcacgccactgtagccagcaggtatcaattgcacataccttcttgattaagcgtgggacccctggtctacttctctctcattgttgggaccccctctggtttgaacctgtgcaggtcttgggtacactgtcacagtctctgaattcatctgtgcatcagtcctgttatgtctagaggacaataatgaaactaggttaaaccttatattctatatttggaaggctcctaaaattttaaaaatggacacagaagagccatatatcaaaatggtaatttctttgacaaaattggttccaaattctaatactggagaaaaaaacaacaaacaaaaaaaccaaaccaatcaaacaaacaaacaaaaagcacctggtcgtggtggtgcacacctttagtaccagctctctggaggcagaggcaggcagatctctgagttcaaggccagcctagactacacaatgagttccaggacctcgaaaactacacagagaaaccctgtctcaaaaaacaaagaaacatacacacacacagagttaagccagagcaacgagtacttgctgtgtgcaagcttgccagacagagttccatccccagaccgacataatggtgggcgcagagaatgaattccacaacgttgtcctctgtgctccatgcttggagcacaggatgcatggcatgcatgccccaacacatcacacacagtttcaaacaaaacaaagtagaacatagaaatggaattaaaactcaaacctatctagtacctggggttgatctaaaggaagctgattgctccctaaagtgggccacagttaactctggctggtagaaaagcgctcttgggggaggcaccggcttcaggtaacttgcttggtttctggtctcctaagtccctggttggtaaccggaatgagatctatgctgggccgcaaacgccaaacctgcaaccccaacccccgatgaagttaattaagtctgagtcttggtctccacagcaagttgatgccagaataaatccagtgtgttgtcagcaggctgagccaggagcacagagctacagaaaggaatttctatgcaataaatatcacttaaattcctctcaaagttggagctggtgtcaaagtccaaaaaagcaatattccctggcaactgctggcagaagtgtgcgtgtgtatctggccatgtatcatctcagcactcgaattagcggaggagagagatagtgagttaatatcgcccagctggctgctcagagaatggctgtaactggagccagagaaattccaagagggcacggccagtcatcaatgacctccaaacgactagatgctcagaatttcctggcagcctgggctagataaataactccagctgctctgcaataaatgggttcccccaaatgtctcagggaagccagttctttctcttgctggttattgagcctaagaaatactagaggtgaaggaaagagagtggggacacctctgagccatcactatccacttcatctgtggtttgtttctaaggggacagccacctgaggtgggctgtcgtggtgaggcacgtgtgggtcttgtagacatctcattctgctctcagacagacaggtcttcggaaggaaaaaggtggggaggaaggaaatgtggggatgaagagcttgagagcgagagaaagagaagaagagagagtagagttaataaaaagagaccaaagatggcaggtgaggagggatgggcatggtctgtgtcacagaacacactgtgtataaacactggaatctttccggtaaatgtcctatccctctcccatctcgtttttatttcattttattattagaaattttgcctctgaaacaaaggcgatggaggttttgcatccttgctgtcaccctctggtcccaggtgtcccctagcaagaatgagctcaggcaaacctcctctctcctccttttattcaatctgcttgctcagcttttttgctctcagaaaagcagtgggagtagagaaagagaaaaatggctttggggatttgagagtctgcacccttatccaaggcaggggacagctagccccatggccaaagagctgcatctgttgcagaagggtcctcctgggctgtctgagcctctctggggaaagcagccttacggtcagagtacaactgaatttgtcctcccctggagaggagcaaggctttgcagagcccatgtacagcggggaggtggcctccgcatttggagcaaagtgtttgtaaaaagcctgccagaaacgcaggctgcggagataaacaagctccctcaaagacaaccccaaccacagcttagcattcagccaacaacatggcaatccccggggtgactgtagttcaaggggagtgacatctgcttggggaaaattataaacttgttatttccatttataaatcaggctcctcccgggaaaggaccttgaaaacagcttgtattatcatcgcccactgaaaagacaattgctactggccacagatggcacatctgcagaaatactgtgtctgaagctcttaggattgaaggcatgtgtcttattagccagcactggaattgctggaggtgtttttgttttctcaagtaatgagaaagccatctccaggagtgtaagcttctcgtgtcagcaaacaaaagtgttaaaaacaaatggctggctgtggtgactcccactcgtgatcccaggcaagaggatacagtagttcaaagccagtctgagctactgagtgaagtcttgtctcaaaacaaaccagccaaataaaaagtcccttttttcagtatttttggccctcctcctgtaaatgcatagaggcccagtactcacagaaaagggcaaatttgttagctaatgaagcactggttttaatcaagcagtaagaggttatttctattaatctaatagattcaggggataaccttatgtagatttggatccaactctaaatagttatttattgtacatctacgggtattttgccagcatgcatgtctgtgtatcacatacaaaaaaggacccaaggcagccagaagtaggtgttgggagcccctgtgaactggagtaacaaaacaaagggctgtgagccacaatgtgggtgccagacttgaacctgggtcctctgcaagaacagtcagtgctcgtaactgctgagcaatctatctccctattcggttgttttgatgaggtctgtttttttttttttttttttttttttttaataaaaactgctaaaagttccatttcgatctctaaaataatggctcattgaatttcacattcaactaataaataagcacaaatcagttcaggttccaagtaattaggaccaagaaaaatgagaaacaagtcataaactcagatacagttgactaactcatctaatgctcctttagtttttacaaatgtgtgaatatgcattatcttccatctccccatttcctttttgttccttttttttttttcttttttatagacgactttccgaggtccctggtactctatatgaagggctttggacatttgaagtcagattggaggcaggaatgagggagagtaattgggagctgtgtggggtttttgtttgcttggttgcttggttggttggtttttttggaacagggtttctctatgtagcaatgttggctgtcctggaactccatcaggctggccttgaattcagagatttgcctacttgtgcctctgagagctggggttaccacgcccgcctggtatgttcattttaaagggcagtgaatgtgactgtgggcttctgcatttgttgcctccatctgattggggagtcagaaagctttgccaaccccaaatccctgcagacccgatggcaatctacttgcagcagatcaagtagtatgaccttctaggccaaacagccaaatggaccgcatgtaacatttgtcaagatggcccatggccatctgtcccccaggaagctgatcactcaaaaggattggttcccccatcctcatggtcagggctgccaggtggcaagatgtccaaggctatcagaggggattagttgtatcacttctggcagtgaccattttgtcgaatggaattaaagaagcaagagtagatgaaagaggaaaaaatacgattggggaggggggggaaacacagagaggagacaacagggagaaaaatctggagggaaaaagcaggtaggcctgaagacacgatggcccaggagaggaaaggaggtgaacacggaaacataccagccctgcaggaagggaaggcagacctttacagaagttgggaatcagtttggcctcttctttgctggtccattcttctgacatcataggcagaacctaggtcagggaagcagcgccaaggacactagagcaaagactgtatccccaagcaggagctgacatgtctaccaggggctgacatgtctaccagcaggggctcaaagacaaggaaggggctgattcccaagctgggactgcccggctgggcccaggctgtttgaggaggagttcgcaatgctgactggggatttcagaacagccataaactggacttagaccttgtcctgggaagtaaaaagagaacgtcaagatctgagggagtaagacacatcagcctctgcaccatcagcctctccaccatcagcttctgcaccatcatcagcctctgcaccatcagcctctgcaccatcatcagcctctgcaccatcagcctctgcagccacttgggcatgaggagaaccctgtggccagaggacctggggtctgtctgtgtacgttaggtatttgaccagcttggctgacctccaagacccttgtaactttaccctcctaatttttcagcttcctgcattcatgggtgaattggtcagaaccaacctttcacttcagcatcccatcagcagtcctttttgctgcagcccgccgtgagtgtgtgtgtgtgtgtgtgtgtgtgtgtgtgtgtgaatgtactgtaatttaagtagtcaaagacctaatgttaactgagaattgatagagctggaggttagtggaggaaggtctgattagtgagaggtgtaaagtgactttttttctctcatttcaaaattatgtatttgtatgcactgtagaagctgggtaataagagacggcaaagaacaaccagataacccatattttcacgagccagagctgaaagcaccgttagtgtttgagggattttgttttgttttgtttttccgtagaaaatgttacatagatttggactcggcagaaatagctctaagatgcagcccatggctctcatgggtctctggccatcctggtgagatgtcctggagacgtcctggactctccaagagcaccccaggttgatcagtgtggcttgccctaggctggccaacctaccctgagccaggctgggtgtggcggccagcagggtgccctccatctcagggacagagcagccacaaaggtccgcccaccacctcccctacccgcaagcaatccgctccctgtgagtcctcatcgtggcggctgcaggcgcggagggctttgcgggcctttgatccacgcgaagtacgtcacaggcgggtgctagccgggcgtgggctgggcacccgagggttgccagactgacaaacacacctccaggaaaggattgagaagtcgcgcggctcggacagcctcactcaccctagcatccccaggctgggaaatgcgagtgctttgtgccccagcaaagcggcccggccttctgaagtcagaaaaaagtcaccgcaggcggcaggactaagggaaaaactgggtctcttttctacaccgtgctgtgcaccgggcatatttttctgaagctgcatttctcttcgtcttgtcaaacgtttttgggaagtccgggcacagagagctgatagcacaggaaggatgggagtcgtcgcaatgggctcagccccaaagcaaggatacaggtataaagcacaggaggtctcacactactatggccccccacagcacactggctcttagtgacagaaagtaaataaaaggtctccgaccttgcagagttctcaggggtttgttgttgttgtgttgtgttttgttttgttttgttttgtttaaaaaacaagggagccttctcttcaaatcattagtgaaaaatgggcccggaacagcagagtgtcagaaaaaatttaaaaatgtgaccaaacttatttttaaaatggagcttggcacacaagaggttttgggctcattgctttagcacggaaaatcgacgaacagaacactagctacatttggaataacaggccccataggtcttccttaaccctccagacaccttctcagaccctctaaccttaaaacgatggacacaattgttactatggaacaaccaaactaaaccaaccaaccaaccaaacaaacaaacaaacaaaacctaaaaattacaggcctttcataagaaatggacatataatggaggatatatatacatatatatatatatggatacatatgtgtatatatgtatatatatatatatatatacctgttttgatacgatcaccaattctatccatttctacagtttaaatttgaatatcttatttgaaagtaatcttgtatattttgttttgagtcaggccagactcaactgcaggacgccagtattcttcctgcctctgctcctgagttgctgggtctgcaggtgcacagcggccagccagctaaactgttatcctgtttaacagtaaatttacccccaggacttctgacttctaggtcaccctgtagaatagaaacagatccccactaaaacccatcctgcttgaacacagcacagcaatgcgtcgagagcgggtgacgtttgtgctgaatattgaaagatgagggttttggcaagctaagaacggttggctgatcttccctggaaggctggcagctccttccagatgaactctggggttgcttttttgattaaccatcagaaggatgctgccccaacaggacctgggcctgtgtcaaaagcagggcagaggcatgatcacagcctgggtctgacctgggaaaacaggaccggtcaatcttccttaggactagaacggacaagctcagagtgtcaagcccctgacaaagcctgcaactcctggatcaaagcggaaagtgaagggcagtttgggaatctgacactctgtaaccacaagcaatcgtaagcaatttttctcctgatgattagctttgaacctgggatcccagagctggacccaacaggagtgaaccagagaagttactaggttaacaacttatttaggagtaaaaaaaaaaaacagggggaaataactttacaaaggtcacacactttgagtgttagctttggccaaagctcccacatggtggtggtggtgggggtgtagaggtggagtggggtgggagtgggagggacaggtttgctcttctcacacaatggctctttgaaatgtaagccacaaggttcctttattttatagcactaatgacctttagccaatcaatcagtctcctaattatctaagcaattatgttattcatgaggtggggggaggggctgcctaaaacctggcttcccaccaggtagagaggaaagaattaacaacggggtttgtcctgggcaacatggagtttgttgagcagtgtagaatacctggttctttgcactgagaatagaacatggatacttttgaggttggtgtaggctggagtttctgggggagggatcctcagtggaactggaaagctgagaaaggctgtaaaagcttggggtttggtggacacaggcaggatctgtggagagcactagggccagcactcaagagctcctgccttcaccacaaagcagggcctttcctgggttgttagataccttggggtttgctctcagtccttaaatcagctgggtctaggcagggggaaagattccagcttcattctggcagcggcagttttttttaaaatttatttaaaaaaatttttttttcattctttttgtnnnnnnnnnnnnnnnnnnnnnnnnnnnnnnnnnnnnnnnnnnnnnnnnnnnnnnnnnnnnnnnnnnnnnnnnnnctccactcctgcctcaagcaatctgttgagtttctaaattgtccagagtggcttatggcttcgaaccaagaacaaggacacccacagggttaatagatcatgacactcacttctgcccctaagcaggctggcatcttgcacctgtttcagaatcccccaagacacaggtgggtggggtgtctcccagggtagtcactagcaacctcccagctggtcctcagagagtggcatcatgggaggaaagtgaggctggaaagagaacagaacattctagaaccttctttgtgtgtttcataaaggtacgcactacagtgtccacactgacaagacagaatgtgacacccttacaatgccaaagccatggttctcttgagtttatccaacaaagggcgagagtgtggctctaattccggttgaggctgccgtccctgggaaagttgtatgtcggcaaacgctggggttgtgtggatatatttatatttatagacatttccagatagtccacctcagaaggctgtgcttcccaaagaatattagccatgacaacacgaggaaccagttttgaatactccacctttggaggcacaaatggttccaatgcaagacccaaaccaagactttacaaccctttagctgacttggtgggctctgctcaaaggcaaacagagtacctccatacccctggagctagctcatccactctattgtttttgttgttgttaattatgtatatctgtagtttttcttgagcacattctcacgagagctgatgagctcagctcactaattccagcctaggccaataacgggataaccactgactcttcagcagcgcctacctcctcattcctgccgcgaatgggaggccacacaaccctgggcatatcacattccagtttattctcccaataagccacaccggaatgtcccacgtaataaaatcggtgactctccacctgctggatatgtgagccaggaaagccccagagctcagagctgacggggcttcgcgaaacgaaagcccttcattctgagagtgttagttttgacgacatttggagtccccctgtgcgagaatagagagcctttctccccccccccatcccccgctccgccccctcccgctctctcagggagggaagtggaggnnnnnnnnnnnnnnnnnnnnnnnnnnnnnnnnnnnnnnnnnnnnnnnnnnnnnnnnnnnnnnnnnnnnnnnnnnnnnnnnnnnnnnnnnnnnnnnnnnnnnnnnnnnnnnnnnnnnnnnnnnnnnnnnnnnnnnnnnnnnnnnnnnnnnnnnnnnnnnnnnnnnnnnnnnnnnnnnnnnnnnnnnnnnnnnnnnnnnnnnnnnnnnnnnnnnnnnnnnnnnnnnnnnnnnnnnnnnnnnnnnnnnnnntgctcccgggctggaggctctgcgaaaggtccgggggcggtgcggttccggggaaagggaccacaagtgggggcggccgcggctgagtgtgagcggttcagatgggagatcactggcgataacccggcccgggatggcgacgctcgacaggaaacctcgagcaagcagggagccagctgcgggccaaggaggaggggtgactttcggtaaccgcacagcagccggcgggacagcagcggagtgtagggcagcgccccccccccccatgtccctgctcactgatcttcacttttgactatgcactcctgcacgatagggctctaagaggtgttggggaaaaaaaagcccagcagcaactagtttcaaatgtgtccgctgggcgcacccaggtttcaccgcaggaggttccggggtagttggtgaatggacccctctttacagcctaaaatcgctctaaaatcagaatggcaggctatctcccagcctccagtctgggcaaggcagggtgacacaaccacagcgtgattcatcagtactttgcgctgccaacgaaggaaaagagcctgcagtgtgagggggtccccgcgtgacagcctctgtcccccactgacagccccgcccctgggagctgccagaggcaggaaggcaagctaaggcatagaaacctggttttagctccggctctgggtgctgtaaaacctctccgcatccagtgtcctgaacaaccgggccaccaagatcagctccaggaagaggttgaccagacgaagccttcctggttcccttggctccattggacttctttgggtaacctaagcagtctgtggcccagaaacccgggaagaacccaggaaacaccccattccggctaagggtgggacccgctgaagggactcttggatttgaaggactgcttcacatctcacctgcctggccctgctgttgctttaagtgtgtattgggggcttgtacagtgaacacggctcatgtctacagcattggatcacagaaacagtggccggcaatcatcgtttctatgtgcactagaaatgtacatagtaaaaatctgtgtgtgaaatatgcatgcgtacctggtcttgtgtgtgccgtgccagaggtcagaggtccatgtctgcaacgcttcaccgttttaaggcatccatcttcacgtagcctagagtcactgatgtggctccggagctcctggggtccttctgcttcctgcttctccaccctaccaccaggattacaaatgcaggctactgacagggcgtttatggcaaggctggggaatctgacctcaagtccgcaggcttgaacagtaaatcctttccctgctgagccatctccccaatgaaccctggtgtcctagtgttctattttatttatttattttttgagtctcaggatatatgtattttaacttcattcttctatatttggggggtagaggcagtgctggtggctaaacacagggccctgaccacactaggaaagcactctctactatgtcccagctccatctttagtgtgtcagagtgtcaagaatacccacaatgccacacaaccattgctactatttatttccaccattttcgtcatcccgagcaaagctgcatctagatacactttaatgcacacatatacctatgtagcctatatgtttctaatttttatataaattagtttgtatagtaactctagagtgtacagggctgctctttttaaccaaattttctcagagatctttctagcacagtcagagggagttctctattgtcagtgagaggtgggttttttccctctcctcagacagggtttcttgtagcccaggctggcctggaatttcacatcctttggtccctagcttctcagtgaggggattacatgtactgtatattgaactcagggttctgtgaatgcctggcaatcagtctgccccctgagctacaccccaggctcttgtaggcatatacaactactatagaaagacattgtaatttttcactcctggtaagtagacatttctgttatcttcatgttttttttccttcttctgagggtaatgatgcaacggtcatttctgtgtacacatctctgcacaccaaggttttctatgaaacaagagctcagagaaatggcaaatcctgtttagcattttgacgggggccatgatttgagaggatttcttttaagttgagctaatgtgcagtgaggaaaagagcagagacctgagtaggctggcctcgctctcaggctctgcctgccacccgtgtgcagtgggaccccaggtcagtcactttacctcccaacccccaaccttccgtctctttatttgcaaaagtggagcaaatcagagcttcccagtttacctcagtccattgttaccactaaatgaaatacaactctaaaagcatttctagattcaaagtgtggagggagccagtgtttagcaggaccatggctgtgacagtcagcagctatatgccaaagctagcatcaagaagaagggatgggtctcctctccgtacctgttgatgtatgcagatatgtaaatatacacaacacccttgtatattgtcctttgtatatgcattgctgactttttttgtatgtttgttgacattgagtctttttctatgtagccctggatagcctgaagctccatatgtagaccaggctggcttcaaactcagagacctttctgcccctgcttctactgtgagggatgccccacccaaccctacaatgcattgttttttttacaagatctttatatattccacccgtagcacagcgaaggagaacaaggagaccattaaaaacagtatttaggggctggcccagccaagaaaggcaccggctctccaacttgatgacctgagttcaatccctccaacccacatggtggaactcgagaaccaactcaggcaagtcgctgtctgacctacgtgtgtgcactcatacacatatgcacacacacaaacatgcataagcagatgcaaaaatcgtttaagagatgcactaaaactatgaagtagccccaaatataaagcatggttccgtaaaacaacattaactattacaacatttgagaagctatagcacagactgaagaaaagcacagcttttgttttgttttgttttgcttggtttttttcccccctcaggaaaaaatgttttgattcagggttatcgtaagtgataaatagcagacttgttggaaggcaagctgttattatacttctaagtgaccgtgtttcaacatgacattatgagagattttgatagtttttcttacctttctgcacttttataatgagttcattttacttgaaaataggaaaaaaaacacaataacagaaaaatgtaaaaacattgtgcaaaccacaactttaatggaaataaacagaaagggaaaaatcgctgcccacgatcactctaaatctaagaaataaaacagcccctttctctgcttgggatctttgttacggggatgtgcggtttgtaggtggcagtgaccaggttggaagcatcataacagaacaggaatacgtgcatacagacgctgttggagggtgaggggcctggggcaacttacagcggggagtgacatgtggcacttgtaaattgtggagcgttgccttgaaagtcagggccatcagagtaaatcaaggaaaagctaggcactaaggatgctggccagtgtatgtcctgaccttgcagtatctgtgtatctccacctctcagcctcaaacaactctctgaagaccagcaagaaagacccctaagagtagaactgagtggcatttaagagcctctcagagattcagtttccccagttgtagagtaagagtcatggtgaagtctgcataaaactcacctctggttctaggcacagaaggaaccccagctagtgggctgtcacagatatgtcatgtgtctagcttgcatccttcttgctgcaatgaaggctaaaggcagcaacccctgatggaaaagcctgtgtgcccccatgctgtggtcagtggactggcaccaggtccggctctgccctccacagtcacccccaccgctgctgctgccactgccttcctgagaacacgtgatttcctgttttctaaattcttaacctacaatgtcatctgtcagttgagtctgaggtgggggtggggggtggacgtcagcaagacccagggtcccaagctggggctccaaacagaggaagctaaggggctgagaaggtggctgctcctacctagatgagccatatggtcaccacagatggcattgagtcctttgtactgagtgtgcatggggtctaaaggatcatagagtggggtgagaggtaggggtattaggggtggctaggttggtttcatggtcacatggccttggcctcaaattggctccccttcaagcatttggcctataaactagacattcaaagactgagaaagagagctctccaccaggggttgggtgggtggagcgcttctcaccccaacagtatgcaagcaaaggctggaaggctggtcagagaagtctttatgaaggcctggggctattcagatgaaaggagtcccctaggcactgggacaaagtggagcagaaggaacttggctccaggggcactcagggactttccagctcagtgacctttgggagccctgttcttatctgcgaaaacacaattatcaacgaacctggtggaattgtaaacaattgcactgagcgttaaaccagactgtgcaaggagaacgagttttctaaactgtatgcagaacagcaccgatgggagtcttattgtggtttgtgaagccaggagccttcagaatgcccgctgcccctctacgatgagcgtcttctatagtcaggccctccgtacctattggtgatctgacttcatctacacaatgctcttgaaagccagcttccatcattgtgtgttggagagtctgcccagcttccgtccccaaacctagcatgaaggggagagagtgcctgtcctctactttctgctgcctgcacctacagagcctctgtgtgacaaggacacactgctggagtcctgcagggttggcacatgccactgtgcaggggtcctctcatgcactttgaccccatttgctcttccggccctgtggtgtcagtctcactaagtcattttggcaggcagaggactgaaggccagagttaagagagttctcaaacactaagccaatgagaatagactccgaccttgactaatgagcgtcttcctgcctcagaggcctgcgctcttccctcatgtctcttggctagtggtacaccccagtgaggaaaaccagaatgaaccagctgctttccagcacccactgaaagggaataaaccaagtgacgtatgtggtcacacacgactgagaccaagtatccaaagtaagggctgtgcattcataggtaggtgggttttctggagcctgcactgaaggtgaggaggttccccagactgagggatgaggaagtgtccagaatcaggcagacactctagcttggccatttgttggcaagtgttccggatgaagttgcttcagtttatcaagctgtgtactgggccccatcaaagctttctacctgctttctggactcctctcagagtcgaactctatcagaatcggggagtcattttaacagcaaaagctgtggtcagatgatttgagggagtggagcagatgcccagcttctcaactggatctgctggaagagttaggtgtggagacacagcagagtgtgtctgcagctttgagaggatcctgctgattaagacctaatccctgtggtgggaagcaagagcctggctgggagacactgacaacaggctgcacgtcactggagggatgagactgttagcactcctgtctcctcaggctgccctttcatgtgtcatggcacctgaaccaaggctcttgtgagggtgacaattcagggatgactgtgctctctcttgctaaggacattagtctttgaactgatgggtactctgacagatactccttgagctatcactagctgccctggggacctccaccgagtctatgccaggtgtcccgccacaaggcaaagacaacagctttttagccatgggcttaaaagtgaaaaagaagtgctctggccaaccagcattatgagaacaaatcaggtccctcacctggtaaatctaattatccgtgctcctccatcaccaagaggataagtaatgttacttcctctataaggagaggaaatagaggctaaagatggccagagccaggagcattgcagccatgccttggagcagagcatgaatgtgcttctcaacccggctgggacattttctcttgtgcagatggtctggctgcatagctatagaaggccacatttctctgtccacgatctgggctgtatcagctctgttggattctggatctccccagccagtactgaagtccccctacccaggccctagcccacagtggttaagtcaacctctccagggagctcgggagcccatcctaacaggcaggcaggcaggcaggcaggcaggcaggcttaccggtctggggccctagaactgttaattggctattgggttttctctcatatgttggagttttcctgggtgctgggatctaaagtacaggtggagaccaaagataaagtgacttccattgtacaagaaagcagttgccatagctggcccctagatacatcctgggaagcgtctgagggctgtgccggggatgagctgcggcagagagagagagagagagagagagagagagagagagagagagagagagagagagagagagagagagaaagagagagagagacggcagagacagagatggcagagacagagacagcagagacagacagagacgagagcagggtgtgcaaatggctcagggtaggagccggtcaggtctctgcctgcaagtaggaggggacaaggaagacactgggatcagaccatacaatcaccacaagtgacatcgtgaagagctgctgctggaatggatgcctgaacatcagacaccattggctttatagaagatagaaaacctgccacttacaagccacctggcaaagcatccttgtgatagcccttaaggccgatataagcactcccaacatgttcttaggaacagagggctttaggcccagagaagtgaggttaccctctaggaccacacagctagtaaacgggaatggggaaccatggaagccacctgccccaaactcagcctgtctccagttctgcagctcttggcccagagccagtgcccaacaaatagctaataaattatgcgactgacttaggtcctgagttcttgcatggaatttcctgggctatcactacattctttaggcccacctctcagtacacagactgtagggctgaggacaggaaccatccgtgcaaagagttggattaatgctctatccttgccaaccccacacgtagcacttttgttgctggccataaaacttgtgcttctctttacagagaaagtgagaaaacttgtcctgttattcatctctgggggatgggtgtgtgtgtgtgtgtgtgtgtgtgtgtgtgtgcccaactccccgcctgccacctaccgtgctgactctgcacaacacaaagaaatatttcttcttatttgttctaaatttactgtccagtattttttctgttctcatttcacacgacaggcagctgagtgattttctcctggctttctctatgaatttcaaccacccggtaaatcgccgctgacatatctccagccctaaaagacaacagccaccccagcttctgtggcctttactggagggctggcttgcttcttagatcatagaatagcctggggctggagcctatcatcttcccatccttgaaccgtaccctcctctcaactgtaggaaatttaagaaatgcctgtctcaggcaggcatgatgttggggatggggttggagacaaaaggaaaaagacgcagccactggcttacattctgagaagggaagtctgaatccagagaactctgtagggatctaggctttgcagtcgccagcattccctggctttccctggaggactcaggtttctgattcctgaaggtgctgggcagagcaagcagaggcacagaggaggagccaggcgaacagaaagtgggtgtggagggaattagagagcatactaagattaagggggcagcgaggataaaggaggaagtgttgggatatggctcagtaggtaaagtgtttgcctgccacgtgtgaagccctggggttgagtcccagaatcaccaagcacagagatgtacatctgtaaattcccaggactccagatgtggatgcagggcattgcaaagccaaggctgtccttggtgctataagttcaatgccagactggaacacatgagacagttgaagaagggacagggtggtagtgagttctttccagtctggcctggaaaggcagagcatttgtggggctgcactgagtcccacactttgaagtgtctttgagcgggattgagttggtttctgagcagggacctggggccaggagggaccctggatgagagagttggagttaaaagctgagaacagagggctttagggacatggtgatgggggacagtgagtgagatttaagtcagccttctattgtatgtgggagcagatgagaggtttctggcatagtcactacctgcctgctctgtgtgcttctggtggcaatctagcggggccttaatgattgcgctcacagccataaacactgcacagaacagacactgaagactttcaacctgttttgcagaagaggcagctggaaggataccttgccggaacttaactggcacccatctgccttacccactgttggccagcgcccaccagagggcgccacttgctactggcgttaggctggaaagccttaaagaccactctgcttgtgtggttctcaggcagggccagagggagggttttgtgatactgggccagttctcagatccacacttacccaataggagggagttcaggatcagtaatatgctcagtttgcttgctttgtgtgatctttcaaataggaaggctaccttctatctaactaacgtatttcctttcctcactccccctgcccttcttatctactgagaaccatacatgctttgagtgtgattcgataaacatcagaaaggcaggaggggtgactctggagtgaggagactaagtagaagaggctctaagctgaaacatgtagtctgcctggaacctatgtagctcaggctggcctcgaactcacaaccctcttgcctgttcagtgatgggactactgatgtgcaccacgatacctagacttcactgataatgactaggtattgagatgattttatccaattatctaatttctgagccctacatttgtaacctctagagtctctctctctccgtataaaggccttagttacctaggtacatttctgaggtttagagtgtcatagtttatgcaagagctcacttacagcggggcttccatgtcaccagagcagaagttctgtgcacagcagtttcattttttcctaatactccctcattcttcccagcctctgtggttacatctggtacattggttacattgtatgcataggtgcactcgttacatctgatacaagtggttacactgtatgcataggtgcactcattacatctggtacacatggttacattgtatgcataggtgcactcgttacatctggtacacgtggttacattgtatgcataggtgcactcgttacatctggtacacgtggttacattgtatgcataggtgcactccttacatctggtacatgtggttacattgtatgcattggtgcactcgttacatctggtacatgtggttacattgtatgcattggtgcactcgttacatctggtacatgtggttacattgtatgcataggtgcactctttacatctggtacatgtggttacattggccattgcaggctgggtttcttcagactcagtgagagaggttgtaggttgtggtctgtgtgaagtatgaggactggacctagtgcccgtgacatgactacaatctgtcacagaattgacctggggtaggtgggatgtgttcttgccagatccagcatgcctaaccaattttctctcttggcacagaggcacagagctttggtctgctggatcccaaactctgctacttgctagatggaatcctcttcatctacggagtcatcatcacagccctgtacctgagagcaaaagtgggttcccctgggctcttgagggagggtataggttcctccactgggaggatgtgaggtggggatttggcactggagagtctcaggcctgtgctctgcttggtgtccatgggcaaggcaggatacaaccaagcgtgcacagccggtgagcagagaaggcggggtatccatctgtggcagacagagcagctcaatgatccaagtgctatgtgtattactgaagatcggtaccagtgcctggatgtggcttctgctgggaaacagatggcttatactgaacagtttaggacaagaaagtgaaagacagacaagacagcctcttcttagggcctgcggttgagctgtaatggaggccatacagcttttctctccaactcttgattttcccatcctggaaataagaatggtggacagagcatcaggcatcacctggtgcctgaagccgtgggtttgtggaaaggacacacctgggaaggtagaaatctcatcttcccagggcagtagaacccatttcctttcaggcataagatttcatttgaggaagtcttactttatgatttttttttaaatttggaaactacacttagcaccaactctggaaaatcctgcagttcctctcagcttaggtaacatgtgtggttatagcgactcggggcacacagtcaggacagtaagcaagcaaggtgcttcccactcaggaaacagctgggtgagtaatgatgcccatgtgccaacttagtaggaagctttttgtaggcactgtctaccctcagggttcctggaggaaggggaacaggaggggtttcctggattccggcaggcacagacggagagcctggaacccctgcacacagggtgtgtgggggtgtgtggggggggcaaggcctttacttgggatgattaacttctctgaagactaaagctgtaagcactttagtcaggtcgcaggcaggagaaaggacaactgagttcagaaagaagcggctacactttgggctagccacagggagccaacaagggagtttgttgtcatcgggcatggaggggctgacacgcagctctgcactatagccagtccgatggccccttggaggtggtgctgagctctgattctctctgctctgttgcagttcagcaggagtgcagagactgctgccaacctgcaggaccccaaccagctctacaatgtaagttcccccttctgcagaccttcttggaaagccttgtcctaggacctagggaaacttcaaggtcaggttaagctgtaggtctggtccaaagctattggcctggtggctgggtggcaagcctttgagcctcaggtttctaatcctgactggagcggaatcctgcttgcccctcagtgctgctatgaggacgaggagctttaagaatgagatgcatggcatggccctgcctcaggagaactttcagtcactagcaattttgcaaaggcaagaggccacagcacagagggaagggtcccacagaaacgcagtggggctctggtctgtgagattcccctctaggtgcctccatttcgcatgctaatgaaagtgtatcattaaccctattagatcagcacatggtgacttgggggttcccaccatgtgccagcaaggtagcaggtgttttctgaggcgctagcttgaagatgaagcagttcccaccacctttcttgccttgatccatgctttaactggagagatagtgaagggtgcttggtgttcttgcagaggacgcagccttgcccccagccttgcacctactggctcacaaatatctgtaactcaagcccaggggatctgatgcctcttctgcaggcatgtggtgcacaggcatacatcaggcacacacacatacacataacacacataaaatgtaaaaattacatttgctttttattgtgctttgtgtgtgtgtatgtgtaccgtgatgcacacataaaggtcagaggacttctcttttgccatgtgggccctggggattgaactcagatctttaggcagaggccagtgccttccccacccacatacctcacttcccctatgctgctttgtttctttttgagccaccgggtgggaaaccaactccagttttggtcaatgtgaccccattctcctcaaggtcctgtttcctcttctaggagctcaatctagggcgaagagaggaatatgacgtcttggagaagaagcgggctcgggatccagagatgggaggcaaacaggtagggcgctcctccgcttctgagtgtgtgggcttcgaggctatagcagcaggtgggcattggactctggcctgggacaagaggatgacagacacttgctgttgtgccttccctttcttcttggttccattctgcgtcagaaggaacctcagtactcagatcgtccttgccttcacgtccatctcccctctactgcgccttagccaacacgatgtcaagatacacacaggaagggctaagcctgtggagaaggcattctggattctgaatacccctctagaacatggccacatcaggctccaggggcctgtgccctgtagggaggggaagggatgggggactcctccgatgcacgagaggcctcttaatagcaggactcaggacaaaaatcccagtgtaaggtcagtgctactcaaagctacccagtgtcctcaatgcttctggtcagacatgcccacttggccctgacctcttagtcctaggtgttgctagagggcatggcaagaaataaaattcctcattcctatttcagtctccagcctcagctcttctccacgggacccggagggtatggggaagggcaaagagtggccacagaaacacagaaacactgaagagcactgactggctgcctctgaatgaggtgacccagcccgtgtctctgtttatggtgcgtgtgagggcgtgagagagcaagggggctgagagatcaccagcagcctaagacatgtccaggtgggagtatgaagtgtggtaggtatgcattgtagagtccctgcccagaggtgtgtgggacggaccaagggcgacctgagcaaggcttgggcaatatggagattgatagctgagccatagggcagggggtagcaggccaggcagcatgaggtcattacacttgccagcctggattctctcaagctcatctctgcgcctttctattccccagcagaggaggaggaacccccaggaaggcgtatacaatgtaagtatgggagagttcaccattcaccctagacagatggaagagggctggcagaggtgctttctgtccaggctagtccatgccttccctgggtggccatgtgccacctgctggtagctttagaacatcctcttatgctgggcagggtcacagcacctcatttcctctgcctttttcttgctgttctgtgggccctgagcctgtgcttggggaactgggcagaagctgcaggctacgctgggtaggagtgtggagccggcttgtcttgagaggacgctcatcccgagggctggagtattctgaacactttctctcattgtaaagttcacccccaccacagtggtgtgaaactagtttcagaccaccaaggtgctccttgccgctgttggtatagcactgcgattggctgatccacagcctgtggtatcagctatgaagagatggcttgttcaaataaatgactctttgctccccctgagcccttatattgtccaatctccctgtcttggtttacagttctaaatcccattttcctgcatctaatgtgaatcgctcaatgtatagatccggtagatcagggaagatttcaaagtcagggttgtgggcagcaatgtttgtatgcctaaggcgtggagccctggcaactggagcctggcagcctgggcacccggaggcttctgagggaatgctctctctgtgttggttaagaagagaatgtgtcacctcttctcttcctgtaggcactgcagaaagacaagatggcagaagcctacagtgagatcggcacaaaaggcgaggtgagcgctgctcttccttgaagccctaggcaggcaggttccttctggtacgaagtcttcctttcccatccattcctccttcaactaagacaagcccatgtgacggcagccatgagcataggtactgccggacagtacatgggactaaggatggactgaggtgtcaggtctcaaaggcaaacctagagcctgtgctaagccctgctggaagcggatcgaaccttttcaagtagtgtcgctgtttatatagtactgttgtgtgcttactgcgtgctgacatggggtcccggggggggggggaatgaaagtgtatggccccttgtttattgatgattttgtaagaacttgaaaatatctaggctagagcattgagttctgagtatggggccctgggcaatgctctaccagggagaggggttgctggttaggaagccgtcccttctgatcccttgagtaggggcagttgagcaagggtgctacaactgactctcttcctctctaatctcctttcagaggcggagaggcaaggggcacgatggcctttaccaggtgagagtggccggcgcccaccctgggcggcacaaaaggggtagagctgaagctactgtagtctgctggtggcacaggcctttgtcaacagacaggacacgcaagcccagggcacacaagtggactggaggtcactccacggccactatggctctacagcttggttgggactcagctgtggaagcgacacatcatttgtatatagcagacaaaagcagctatctagggaggtgggaagggagccccaagaggtgcaggcaagaaacgtaaaggattctctacagctgactgtttcctttgcctcctgggctagcttagttctgctcccccctccccaattgcaagactaagagtgggcagaaaggctgggcagtggtggtccatgcctttaatcccagcacttgggaggcagagacaggcggatttctgagttcgaggctagcctggtctacagagtgagttccaggacagccagggctatacagagaaaccctgtctcgaaaaacaaacaaacaaacaaacaaaaagtgggcagaaagattgaataaaaaaaaaaaagacatcaaaaggacctttcaaaaggaaaacattgtaatcaggtgcctggtttatgtaatttatgcaaacaacgtgcagagaccctactttcctaaaaagggctccctagtgacttcatatttcctgttgctgggatagggaggaagaggctgtccagccagactggggccagctttgcctgaatatacattccacagtggccagagcccggaagctcccggagaaggactgagttaaagagggaccactttccctgtgactagtccagactctctgtgggtccaggtagcacattgtctggcacctcctgggtcccagctcagtgtgtgacatggggaagccaccttcctctttggtcagatgggaatctgatgggccctgtgtgctgcagggcacggtgtctgagttgagaaaagtagagaatcaagctgggaaaagacttgcttgagtcatttgtagcaggacaaagaaccaatctttctgtcagcattctcaggcaagattcccacctgggacgtgaagggatcctcttgggctcctgaagggaccgtggatgagctacagagagtaagcttgtacctgtgagctcctgttcacccttctgtcacttgctttcaccagggtctcagcactgccaccaaggacacctatgatgccctgcatatgcagaccctggcccctcgctaacagccagggcatttctccctcacgggcttcacctgctgatgtcacttgtgaaggacagaggacaaagcccccctcagtttattcatttcccagccaccatttcatgacgaggatggttctctcacttgccacatttgtcttcttcagttccagagcactgaacacagaacgtcatccctggactctctaaagggagagccacccttgctcttccaccccagccctgctcttgggtcttctggcaggctcctctccttgcagagcccagccctagctaggagttgggggtggagggtggggcactaacacactccctcctgcagctagctgagttcagtttgctttgtaaagtccccagagaagccctaggtactgtgtgtattgttctatgggtattgactcgctccgctcctgctgtaaatttggcttctgttgtcacactttgcagtgttgaggtaacatgtaattaggccacattgtgaaaggcagagaggcaggtacaagggagtccaggtaaatgccagccagaggtggctcaaagaagggaagcaacacacaaggaaggttcctagccacaggggaacagtaacaaggggcctctttccatcaagagtactttccacatctcccagcctttgtgccaggcactccaggaacggtaagatgtcttaccttcatgaagaccatgcttttaagagtgcaaataacttgtgtacaaactgacacagaaaataggatgggccattaccgccaacgacaagggagcaagagaaaagggagcaagtcctgccttcttccaggaactcggttcatccctgtcaggtggcaggaagacccagaccacccaggtctgcaacgttcccagtgacaatcagtggccggcaaggtcattgtgtcattaaagtgcctgtacccatggatggggaaccctctgatcgcctgggttttttaatttataccagcttgctattttgcataataaacactttgctaaaaatgatctttgaagccttatttcagtggtgaagcctggggtagcaatgcagacaggaccgcagaaggcagcctctgcagaaagtgatgttagattcagttaggaacgggcagggggcaggggtacccatgcatgaagccatcctgaaggttctctttaacgcatggggtagtgcctattgttggatgctggcacgaggctggctttgggccatcacacagggaaatgctcagtgaaagaatagggacctggcctggccttaggattgaaccggaagaggatggtggaaaggcgtcctgaggcgaacttcactttgagtgcaggagaacttggcagtaatactgagcagagcatttaggtgtgcctggcagctgccatggccctcacacaggggtggggagtggacagcagtattagatcagcttccttcatcaaaggtgacctttaccttagtagtgccttctctaagtagagcatctctacttaagagttcccagttcatcaagcccaattaatgatggacaaaagaataaaatttgtacattggctttataaacagaaatccaaggctgtttattaaaaggccctgaaaattagcgatcccaacaccaatattaacagcataaatagaaagggcttctatgtacacattcctggcaggggcagttcactcacttttaagcctgaagttggggtctttaggcagaatgcacctaacatccaggcctgttctaggcctcatttcaagatcagctaagtagatgtggctggaaaataaaaatctgacccagttctgttacgaatattctcttaggcaaagggaagggctggcagcgagctgcaatgtaactacggagaaagcaagcattgggagaaactgagcagatgtggtcacagaatcagacctggggaaccagagttcctggggagggggcggtgctcgagattcaaggtgacactggcaagcctggactcctgccttgcctgaggcctcgcagtgacctctttcctaacatgatcagtctttcattnnnnnnnnnnnnnnnnnnnnnnnnnnnnnnnnnnnnnnnnnnnnnnnnnnnnnnnnnnnnnnnnnnnnnnnnnnnnnnnnnnnnnnnnnnnnnnnnnnnnnnnnnnnnnnnnnnnnnnnnnnnnnnnnnnnnnnnnnnnnnnnnnnnnnnnnnnnnnnnnnnnnnnnnnnnnnnnnnnnnnnnnnnnnnnnnnnnnnnnnnnnnnnnnnnnnnnnnnnnnnnnnnnnnnnnnnnnnnnnnnnnnnnnnnnnnnnnnnnnnnnnnnnnnnnnnnnnnnnnnnnnnnnnnnnnnnnnnnnnnnnnnnnnnnnnnnnnnnnnnnnnnnnnnnnnnnnnnnnnnnnnnnnnnnnnnnnnnnnnnnnnnnnnnnnnnnnnnnnnnnnnnnnnnnnnnnnnnnnnnnnnnnnnnnnnnnnnnnnnnnnnnnnnnnnnnnnnnnnnnnnnnnnnnnnnnnnnnnnnnnnnnnnnnnnnnnnnnnnnnnnnnnnnnnnnnnnnnnnnnnnnnnnnnnnnnnnnnnnnnnnnnnnnnnnnnnnnnnnnnnnnnnnnnnnnnnnnnnnnnnnnnnnnnnnnnnnnnnnnnnnnnnnnnnnnnnnnnnnnnnnnnnnnnnnnnnnnnnnnnnnnnnnnnnnnnnnnnnnnnnnnnnnnnnnnnnnnnnnnnnnnnnnnnnnnnnnnnnnnnnnnnnnnnnnnnnnnnnnnnnnnnnnnnnnnnnnnnnnnnnnnnnnnnnnnnnnnnnnnnnnnnnnnnnnnnnnnnnnnnnnnnnnnnnnnnnnnnnnnnnnnnnnnnnnnnnnnnnnnnnnnnnnnnnnnnnnnnnnnnnnnnnnnnnnnnnnnnnnnnnnnnnnnnnnnnnnnnnnnnnnnnnnnnnnnnnnnnnnnnnnnnnnnnnnnnnnnnnnnnnnnnnnnnnnnnnnnnnnnnnnnnnnnnnnnnnnnnnnnnnnnnnnnnnnnnnnnnnnnnnnnnnnnnnnnnnnnnnnnnnnnnnnnnnnnnnnnnnnnnnnnnnnnnnnnnnnnnnnnnnnnnnnnnnnnnnnnnnnnnnnnnnnnnnnnnnnnnnnnnnnnnnnnnnnnnnnnnnnnnnnnnnnnnnnnnnnnnnnnnnnnnnnnnnnnnnnnnnnnnnnnnnnnnnnnnnnnnnnnnnnnnnnnnnnnnnnnnnnnnnnnnnnnnnnnnnnnnnnnnnnnnnnnnnnnnnnnnnnnnnnnnnnnnnnnnnnnnnnnnnnnnnnnnnnnnnnnnnnnnnnnnnnnnnnnnnnnnnnnnnnnnnnnnnnnnnnnnnnnnnnnnnnnnnnnnnnnnnnnnnnnnnnnnnnnnnnnnnnnnnnnnnnnnnnnnnnnnnnnnnnnnnnnnnnnnnnnnnnnnnnnnnnnnnnnnnnnnnnnnnnnnnnnnnnnnnnnnnnnnnnnnnnnnnnnnnnnnnnnnnnnnnnnnnnnnnnnnnnnnnnnnnnnnnnnnnnnnnnnnnnnnnnnnnnnnnnnnnnnnnnnnnnnnnnnnnnnnnnnnnnnnnnnnnnnnnnnnnnnnnnnnnnnnnnnnnnnnnnnnnnnnnnnnnnnnnnnnnnnnnnnnnnnnnnnnnnnnnnnnnnnnnnnnnnnnnnnnnnnnnnnnnnnnnnnnnnnnnnnnnnnnnnnnnnnnnnnnnnnnnnnnnnnnnnnnnnnnnnnnnnnnnnnnnnnnnnnnnnnnnnnnnnnnnnnnnnnnnnnnnnnnnnnnnnnnnnnnnnnnnnnnnnnnnnnnnnnnnnnnnnnnnnnnnnnnnnnnnnnnnnnnnnnnnnnnnnnnnnnnnnnnnnnnnnnnnnnnnnnnnnnnnnnnnnnnnnnnnnnnnnnnnnnnnnnnnnnnnnnnnnnnnnnnnnnnnnnnnnnnnnnnnnnnnnnnnnnnnnnnnnnnnnnnnnnnnnnnnnnnnnnnnnnnnnnnnnnnnnnnnnnnnnnnnnnnnnnnnnnnnnnnnnnnnnnnnnnnnnnnnnnnnnnnnnnnnnnnnnnnnnnnnnnnnnnnnnnnnnnnnnnnnnnnnnnnnnnnnnnnnnnnnnnntcctggggagggaggggtgctcgagtattcaaggtgacactggcggcttctcaaacagcctggactcctgccttgcctgaggcctcgcagtgaactctttcctaacatgatcagtctttcattctagatactactagctgtaagatatggagtactatcacttgtttcagagggtttcacacatgttaaacataaatggttttatttcatggttacaaatgtaaagacatgtttaaaaaaaaaaggctggaaagatagctcagtggttgagtgcatgttgttcttgcagagagcccaggtctttggaatgagagaaggctctttacagagagactctttaccaatcctgtggggacctctgcttcctatgaggcctgagaagcagctagaataaagctactttctaaaaggaggctaggagggccagtcttacctcttcatagggataacatacgtttgcttactagagtcattcttacgaaagaaggtgtcgttatctttaccaaagagaatgttaaaacttttgacgttacttaaaaaaataactctacagacttacatgtaagacataaatattagaagggaaaggaaaaaattcatttaacttatgagcagaagggagagcccataggtctttttgctttgacactttgtcattttgagatgggctcttgttagcacatgcctgtcagaggcacttcccaaagctcttcaaaagcttaagacttctctctgtgggaaattctaggattctactttccttatgacatcagagcaccagatgttgaactgtctagaaggcaggagcttagttatgcacacggcaggaccaagggcccatctgagatgtgccaccttcagaggatcctctcccaccactccaccactcttggttcagggcatggtaagaaatgctggaggttcttgggcctgtcagacaaacaactgagcctggagagtcaagttcaatcccagcagagacagacagacagacagacacacatacacactggcagggatcagtcaagggcctttgtgtttgaccatacaaagcagtcagctctgaaggagactattgctactcaactcagggtgccactaaatccagtggagggtctagagaagggaaacacagtggccaccgctcactaaggaagccaggagaggtcataagggcttgctcagactccgagattcccagggagaaccgtggggagaaatgtttcggaggcctgtaaatatccgtgcaaatgcttgtggagagcaccagaacgcccaggcagtgacctcacagagacacagacaatgtgaaaacacttggaaaatggtttaatgttttacaacagaaatgggaactgtacagttacagtaagtttaatatatataaaaaattacagcagacaaatgcatctacataaaacccagcatttcactctgattcactggcgcccacacaatctctcccaagccccgccctctggtgatccccggaggggctcacaaaaagggcacttttttttttaaagagacagcacctctcacagtcaccacttccccaggcctcaggagctatctgctatgcccagttagtagaagtgtttgggtttcaggttttccaaatcaagaaaaacacatttcccatgggcacagataacagggccagtgctccgagctatcagctgaatcttataaaatatccccattgaaggggaaatggctacagacgttctggggcagtgaggctacacaatagccacccagactgcaaattcatcttaaggagaaatgtcagaggacacccaataaactacccaggaacggctgctgctgctgcctcattaaagctgctgggcaactccggaaagaatcatgtacatcatgttgtaagtttccacaaagaagaactcaaaactcacattttaaaatacataaaataacatattttgggaggccaaggtgccagttcccttgtgttcctcccttgacaacagtggaaaaacacccctgaatcaatagtaattaaaaaagtaggaaaaaacaagtggggaagttaagatatttaaagacagaagcaaacatctttagaaaacacaatcaccgtctctttaaaaccagatcccagctgggcagtcatcagtgcctccagacactccgtggacactggtagagattgttatttaatagtatgtacactcagaacctctcacttttatatgaacacctaggcagtgaaaactgttatgttaatacatacagacacacccaaaacatacaaaaatactattatttcaaactaccaagaataggacagcgcagttatttcatgcgatgactttaagagcattacactgaaacaaacaagaagttaaacgacattttttttaatatcctggaaatataccaaaatatacatctaagctttggaattactgaggttagactaatgcaagtgccggataatcgtacttagtacacaagtctaaggttctgcaggaaagaaattgtctttggtatctgcatcaggctagtattattaacatttggattttgctttgggatagagcttgtatgaccctagaaccaaaacccccctcccccaatcaactgagattaaaaagatccatgtaaaaatttccttcatttgcaacccgcaacccacccacccccaagttaaaaagtcacaggcgtctacctagcacaaaggttatgaaatacaatgcatagttgcacagtggtgctgcaaaaggaaacaaaactagaaacaagattaaaaaaaagtttgacaattgttctgcatgtttcctcacaaacaggacagccacttccaagcagtgcagttcgggaacagaagagagagagaaggttcagaactcacaaggacccttgggttaagagcccgccccaaaggtgaaagcacccagcagagtagccaatcctgtgccagcgtcttcagcatccccactctgtggagtccatggccacccagtagcagctcccagctctaaggccctgtgctcagctctggtgatgaccctggctgctgtcacatgagttgtggtgaggatgggacttttgaaaaatctgatgttccaatttctttcatgcatgctctactcagaagtgagcaagggccaaaactcctgggcatgcatctgaatgaatctctcaacttagaaaagacttgcctgcccctctgagctggccaggtgtccccacctaccctttggcatgcctccaagtgccaggacgccacagactgcattggggccgaagacttcccttttctttggtttttttgtttgttttgagtttatacaatcattaagaaatctttggttttggctggaaatggaaaaacaaaacaaatcaaagaaaccaccctcccctggcttatagcagcagtattatgacctgacctggctgagctttccccccctccaactttgggggtggaaattgcaagttaagaactacattcaaagaaaacgttgaaagggccggagaagcagcttccagaaagcccgtcggatataagattgtcaaataataataactattattataatatattaataataaacttaaatatttgg

SEQ ID NO: 1813 - DNA, 1678 bp, Mus musculus
cccacagtcctccacttcctggggtgtcagccacagaacaaagccagcagagactccatcagcgcctccttttctcctcatcctcccaggcatagctgcctctgcctctgcctctgggtaccatcccagggaagcagaagatgaagtggaaagtgtctgttctcgcctgcatcctccacgtgcggttcccaggagcagaggcacagagctttggtctgctggatcccaaactctgctacttgctagatggaatcctcttcatctacggagtcatcatcacagccctgtacctgagagcaaaattcagcaggagtgcagagactgctgccaacctgcaggaccccaaccagctctacaatgagctcaatctagggcgaagagaggaatatgacgtcttggagaagaagcgggctcgggatccagagatgggaggcaaacagcagaggaggaggaacccccaggaaggcgtatacaatgcactgcagaaagacaagatggcagaagcctacagtgagatcggcacaaaaggcgagaggcggagaggcaaggggcacgatggcctttaccagggtctcagcactgccaccaaggacacctatgatgccctgcatatgcagaccctggcccctcgctaacagccagggcatttctccctcacgggcttcacctgctgatgtcacttgtgaaggacagaggacaaagcccccctcagtttattcatttcccagccaccatttcatgacgaggatggttctctcacttgccacatttgtcttcttcagttccagagcactgaacacagaacgtcatccctggactctctaaagggagagccacccttgctcttccaccccagccctgctcttgggtcttctggcaggctcctctccttgcagagcccagccctagctaggagttgggggtggagggtggggcactaacacactccctcctgcagctagctgagttcagtttgctttgtaaagtccccagagaagccctaggtactgtgtgtattgttctatgggtattgactcgctccgctcctgctgtaaatttggcttctgttgtcacactttgcagtgttgaggtaacatgtaattaggccacattgtgaaaggcagagaggcaggtacaagggagtccaggtaaatgccagccagaggtggctcaaagaagggaagcaacacacaaggaaggttcctagccacaggggaacagtaacaaggggcctctttccatcaagagtactttccacatctcccagcctttgtgccaggcactccaggaacggtaagatgtcttaccttcatgaagaccatgcttttaagagtgcaaataacttgtgtacaaactgacacagaaaataggatgggccattaccgccaacgacaagggagcaagagaaaagggagcaagtcctgccttcttccaggaactcggttcatccctgtcaggtggcaggaagacccagaccacccaggtctgcaacgttcccagtgacaatcagtggccggcaaggtcattgtgtcattaaagtgcctgtacccatggatggggaaccctctgatcgcctgggttttttaatttataccagcttgctattttgcataataaacactttgctaaaaatgatctttgaagccttatttcagtggtgaagcctggggtagcaatg

SEQ ID NO: 1814 - protein, 162 aa, Mus musculus
MKWKVSVLACILHVRFPGAEAQSFGLLDPKLCYLLDGILFIYGVIITALYLRAKFSRSAETAANLQDPNQLYNELNLGRREEYDVLEKKRARDPEMGGKQQRRRNPQEGVYNALQKDKMAEAYSEIGTKGERRRGKGHDGQGLSTATKDTYDALHMQTLAPR

SEQ ID NO: 1815 - DNA, 1349 bp, Mus musculus
cccacagtcctccacttcctggggtgtcagccacagaacaaagccagcagagactccatcagcgcctccttttctcctcatcctcccaggcatagctgcctctgcctctgcctctgggtaccatcccagggaagcagaagatgaagtggaaagtgtctgttctcgcctgcatcctccacgtgcggttcccaggagcagaggcacagagctttggtctgctggatcccaaactctgctacttgctagatggaatcctcttcatctacggagtcatcatcacagccctgtacctgagagcaaaattcagcaggagtgcagagactgctgccaacctgcaggaccccaaccagctctacaatgagctcaatctagggcgaagagaggaatatgacgtcttggagaagaagcgggctcgggatccagagatgggaggcaaacagcagaggaggaggaacccccaggaaggcgtatacaatgcactgcagaaagacaagatggcagaagcctacagtgagatcggcacaaaaggcgagaggcggagaggcaaggggcacgatggcctttaccaggacagccacttccaagcagtgcagttcgggaacagaagagagagagaaggttcagaactcacaaggacccttgggttaagagcccgccccaaaggtgaaagcacccagcagagtagccaatcctgtgccagcgtcttcagcatccccactctgtggagtccatggccacccagtagcagctcccagctctaaggccctgtgctcagctctggtgatgaccctggctgctgtcacatgagttgtggtgaggatgggacttttgaaaaatctgatgttccaatttctttcatgcatgctctactcagaagtgagcaagggccaaaactcctgggcatgcatctgaatgaatctctcaacttagaaaagacttgcctgcccctctgagctggccaggtgtccccacctaccctttggcatgcctccaagtgccaggacgccacagactgcattggggccgaagacttcccttttctttggtttttttgtttgttttgagtttatacaatcattaagaaatctttggttttggctggaaatggaaaaacaaaacaaatcaaagaaaccaccctcccctggcttatagcagcagtattatgacctgacctggctgagctttccccccctccaactttgggggtggaaattgcaagttaagaactacattcaaagaaaacgttgaaagggccggagaagcagcttccagaaagcccgtcggatataagattgtcaaataataataactattattataatatattaataataaacttaaatatttgg

SEQ ID NO: 1816 - protein, 204 aa, Mus musculus
MKWKVSVLACILHVRFPGAEAQSFGLLDPKLCYLLDGILFIYGVIITALYLRAKFSRSAETAANLQDPNQLYNELNLGRREEYDVLEKKRARDPEMGGKQQRRRNPQEGVYNALQKDKMAEAYSEIGTKGERRRGKGHDGQDSHFQAVQFGNRREREGSELTRTLGLRARPKGESTQQSSQSCASVFSIPTLWSPWPPSSSSQL

SEQ ID NO: 1817 - DNA, 87847 bp, Homo sapiens
gggggagtgcgaatttcttggccctgtcggcaggtgctttctcaaaggccccacagtcctccacttcctggggaggtagctgcagaataaaaccagcagagactccttttctcctaaccgtcccggccaccgctgcctcagcctctgcctcccagcctctttctgagggaaaggacaagatgaagtggaaggcgcttttcaccgcggccatcctgcaggcacagttgccgattacaggtagggccgacgtgtcgacggcagggaacttctagaaactctttgtgtatgtgtaggggagtgggtgtgggtagtggagggtggtgaggggctggggtctccttcaaatcctgccctcctcaaatcaatgggcaagtgagcagtgaggggtccggcccggtgctggcatctgctccgtcacagccgagttgggcatcagttcagagccagctgctagaatacacagctcctccaggtacagatttttcgagtgataagagaggaaggaagaaggaagcaagagagcaaccgaggcaggcccagggtagagaaacggagagggagtgtttcacagaagctggacaggatcggaaaatgtcagccaggccatgtttcgtgctgcgacgttctagtcccttcagcttctttcaccctctggctggctccgtcactcagcccctttctttcttcctttgccaacaaagaagattttgttggtcagtcaaggtcatggcctgaaacactccaatgggcccgggagtaagtggggtaaccaaggaggagaggggcacaggcaggaagcaccgggtggcagcctccacagcgccttcgccacctcatggccaagcgtccgtgtctaggctcagccttgtcatggctgtccccacacccacgcctgggactgccgggtgacgcaccatcccaggctccgtgactcaccccagcctgccccttaggcggccatctagcccagccagagggcccggcattgacagaacacggggcagatgagacgatgtgcctggttaagtcaccaccacgagcagcgcccagccaacaagagtgcttgctcctcacctcattcccgatcgtgggagcccagctttgctgcaagcctttagcttccaccatgttttctagcccaggtaatgaggaagaaaaccagtgaaaagaggacaggacaaactgctcagggggatcagcctcgtggcatcttcctgagaagtggggcaggctgaatttcaatctaaagaaacagggaaggtgaagcaagcaaatgtcctcggcccacctgatcgctcctggtaactcacctgggtgtgggaatttgtttaggggccctgttgggagggcaggagaggccatgggcacttctgctcccaccagggagccaggcacagcccgggccagcgcctcgggggattctgaggcccgtgcagctgcaggggtttctgtcaggtcacagctgttttctcagaaaagccttgtggggtctaagtcacacacacagtgtggcagagtgagggtgcctgagcttgctcagagcagcccatccttgtgtgctggggacaaggggacccagaacgctggaatttagtgacttcaggggagacagccaggggcaatagctccagcctctgagcttcaggcttgagacaccacaccagggagctcatataacctttcagggtctttacctgcagtttcctcactggtccatttgtgttcggcttggagagaccaaggtaggggcaaagtgaagttagaaagaaaaatgaaagattgttgggtggcggtggctgccaagcgtggtaaacagaaccccacccagcagacaagatgggggccgtgcctcatttccacaaatagggggcaggaggagaaaactgcacattggctggattttttgcttctcagtgccacttactttgcctctatggagactgatattttagctattttagataaagctaatagacaaaagtgtttcaaaatatcctagcccagaaacgaggtacggtaaggcaaagcgcgactcagagaggccttgacaccgagggctgcgatggtgcttttgctgcctgaggggacacctccacagtctccccggaggaaaggccgcacatagaatttcagtcaggtcttctctcttttcttgctcagttaagtgacccattgcatacatcccttttaaaatgtctactttttactaagctgttgcatttgcatttctttggaaatgcccagattattaggatcaaagcaaatgatgacctggtctgtccacatgaggaggcctccctgagagagaatctaccaagacagtcaccagggcttgaggccagaagatcctaagatggcgtgcctagtggcatgggcacacttgtgcctgcagagccctcagtgcctctaactccctactctgcagtagccaagaatgcacccagcggtcagtgtggtgtttgtcttttatcagtgaggagatggagctctgacatgcagccttggggaatgcaaagcttccaggcttgtgagtggctctgcttttaggaaggtggctggacgtggtagaaagagccaggctaatttcaggtggtgtcccagtgctgccgcttcctagctgtgcaaccttaggcaagttacttaacctctctgggcctcagttttctcacctctaaagaaagacttgtaataccttctttgcagagatgtgacaatgagaagtaatgtaatgtgtccaatacatagtagacagccaataagtaaacattgtatttactattactattattacatctcggactgtcttcttgttctcaaaacaggagatggaaacccatggctgggattcttcatttgctttcaatatgttataaagcagcagtgggcattttctccatctgttgcaatccaactcatccctcttctgatttctgggcacacccataccagcacagaaacataacaatgattgcagaggtaggcccgatagtgaaaaagcagcaaagctctggctggtcataggatgactgttacatccaccattttcattttttaaagatacttactctgtaggggaatattctcccgaagtaaaaacatgtctgaaaaaatatatgcaagatgggggctgtgccccatttccacaaatagggggcagggggattggctggatttttttacttctcagtgccacttactttgcctctgtggagactgacattttagctatcttagataaggctcatagacaaaagtttttcaaagtattactttgaaaggaatcagaaacaaaatccacccagtcatcactggtccgggtggccacctagattctgaagccaaagggctattgtgggtgcacagcgactgagtatctaaatgcaaacttcttgaacactaaatctttgctaaaattgctgggaggtgaatgtgaggcaagcttttaagtgataccagtacaaatttttcatcaatggcattttcaccatcagattgtttcgccctccaatcgcctagctctgctcatccaaatgagctatttcatttttcaattttagcgtttctcaggcttactagcctagagatcacatctgcttctgctaagcatcccccagaaacggtcctggggagctctggcttaggtgaataaccactgctgtatttaattttaaattctttgtatttttgcttttgttctttaaaaaaatacatgtaattattgttggatatatacttttccagtcaaaagttacccagcattgtgtcttgtgctttacttagaagggtccagttgccctgagggaactctcttagattagagttgtccaaacacgcactttgggaatcgtttctcccaagccttatttatctaaggcttaggaccttatataggtcagataattgatttaataaataccggaaatagttcaaaataaatttcttagctctgcttcggccaaggctaatttttattaacactaaagtgatggtgttcgtcactttgaacaaacattcaatatggttaaaaaaaaaaattaaaccggtcattagacctgttaatcaaaacaaaatgatcgctttagtcagcgcatgtacatagtatgtcttccggtctaaaaaacaactttaagttccctgaaaacaaagacgcccctgtcacgctcacagctctacccagcacttagcatggtacctggagcagagtcaatgtgcaataattatcaataagaattgttgaatgcactctgggaggccgagacgggtggatcacctgaggtcaggaatttgagaccagcctggccaatgtggtgaaaccccatctccactaaaaaatgcaaaaaattaactgggcatggtggcacgtgcctgtagtcccaactacttgggaggctgaggcaggagaatcccttgaacccgggaggcggaggttgcagtgagctgagatcgtaccactgcactccagcctgggcgacagagcaagattccatctcaaaaaaataaataaaataaaataaaataagaattgttgaatgaattaaaaggtgagtgaatgaaggaaatctagatgttttcatacgattaaattaactttaatggtttatttggtgggtatattgaattggcattgtttggacctttcctctagagaacgtagtattaaacaatgttattttaaaaacaaaacaaaaaccagaaattaaaccagtggaggggacagggcagtttgagtgattagaattatttgaaatgagttgtaaggatggtttaagataaaaccctgccattattaaagttttctggttggaccatatgaaatttccactatttgtttatttcagatctacaaaaaggataatttcatatgattcaactaacattataactaaaaataaagaaatatgctcattttttctgattaggctttaacaccggaggaaagcggaaaataagcaaggctaacactgttggagattgttaactaatgaactaaaaataaactaatgaaaggcatcaggtagcaaaagactggattatagtataaaccacagtatccaatcacccagtttcctcaaaatatagaaagaaaaaaaagcaagatacttactattagtctggtttgatccaggttactaaataaatatttcaggtagccaacatttttctgttctcttagtttgagatattttagtaaagatataaaaatcactgacggaagttaaaatttaattaaaattttttcaaaattcctaccaagccagcccaataatattgcattctcacttctttatattccaatccaacattttttacaagtgtaaaaaattttactatctttttatagttaacataaaaacataagtcatatcataatcaaaacataaaacatatcattaaaaagtttcaagtgctttttttcttaatattttattgtaagcattgttttcatgtttagcctttgtgattgtttttaattgctatgtaagcttccatagcatccatgcatcgtattttcttcactatttccttattgttgtacatttggactatttctgatttttgttattttagctaatcctacaagaaaatctttacatatgtagcttttgttactttcttgggcaaatccaggaatgacatttgaaagaataggttaaagtaaaacagcattttgcaggatgctctagacttctgttgaaaacaatcccatcaaggaaagaaaatgtttctctaactctctgttaccatctccaagcctttgtgtctcctctggagcaggcactatggtggaaggagaggaggctctggagccagaagtcctgagccgccttcccctccccacctcagagccctgttcttcctctgtgagatggcggcaatggtgcctcttcacgcaggggactgtggagtggagatctgattcggaagtgcctaaacacaaaaggcacttggaaagccagaaccattagcatgtgtgcctcagtttcccaatctgcaaaatagaatatcattttcccaatgcaataatgggggaacactggactgacatgctttttttcttcctctgtcattacattgcagtgtatacttgggcagaaatttctctctaggctttagttttagcatctgtgagataaattatgagaggattgaacatcccttttagctacaaaatgagttgtgtgtggtcttgaaattacaaagttttaaagaacatttaatgactcagcccccgatccttaccccaccccacaggtattggctctcagaattcagagcctgaacttccttcttccttgcctctccaaatactttttaaatctgggctctcaccttaccacaatatttttaacattctaagtgggagcctctgctgtgaaaaatccaaggacaaagtccatcccttctgcttgtgcgtcggctgcagatttattgggggccgtgcaaggacttcggttggtgagaacagacttgaagagaaagcaaattactgcccgaagcagccaaattgcagtggtgaaaatgttaggcgtttgcactgtccactttgcttgcctgttttgatttgtgctactcagcaactaattttcaggctcaaggagaaaaaaataaatagaaagcattagaacaaagacaagcaggacccttgccagtccagaccgccgttctctgagtgcagccatccctttacagttgcaaaatgagtttccatgcctttgtttactggatcctcataaccatcctatggcaaatagcagaaaaagcagcaggatctatctcttctcgtaaatgaagaaagtgaggctcgtaggtctggtgacttgcctacgagtagaaccaggccgcaaacatggtttctcggggccctcgtacagggtctgcaccttgaacagtgtgcagccgctcgcccaggtccgtacaccatcatatacccaaagactggattctgaagcctacttctaaaggtattccccttactaagcacttactcttttcctctcaatttttacagtaaaaaataattattttgatgctgaatattctcatttaatatacattttctgctgagtatgaatattaggttattaatatagaactatatgtttttctagaacgtattatgatggttctaaatggagaacttacattttctccaaagctgataaatccatagtttccattttactctcagaaaatgcatctattctggaacttccttagagggatgcgcctcaatttgcagttcaacccactcctgtgtgtgcaggtatgcacaccgcttaccaccccactgtatgcagaggttataagtaaaatgtaaattaaatcatatttgagaggttttgccctgaataaattgcctgtaattaatctgcttggtaagagtggatctccatatggtgtgaaaggttttatgtgtatgagattctctaaaagaacagcacaccgtcacgcacagactctgaattgagatttgttttttcactaactcctccaggactgggagagttatctttgaatgacaaatgtctataatctattcacaattatttacgtcatattttagcctggggttcacctgcaggctcggtgcaggtagtgcaaatccttgtgctgttgactggagcaaagcaaaagatggttttctggtgctcagaacaaatgcatgaagcattaaacagctggagatgtgaatatctgagactcttagtgggccacccccaaagctggctgagaggagggttgggaagaggggaagtattcaagtgctgcagcaggatgtctgtgatgggctgtaggtgctgttgcctttgccaagccatggcaggtggggaggagggctcagaatggaaaccaacatcaccatttaagattaacaaacccctacccccctcttttgctgtagatactagagtctactgtgtcttcttgtattttgctaattccccaccatgcaaaattgtactggctccaagacagaatgtgaatgacagccctcagttagacctgccctttcatcatctgggctgggcatgatgggagagaagtatgataggggaaagagtagaaaagacaggctgggggagggggtagaggttgcaacctgttcccctgggttgactggcctgagctgcctgctgcagggagaaggcagctgagccaggtgacccatcacgtgaaaagcctgagcccaagccccaggggttgcaggtcagtgtgggtgttggcaatgtgcacgccagcatgtatttacccataggctctggtggttgcaggtgtctgtgccccctgtgggcatatgctggcgcatgtggtgctgtgtgtttgtaggtgtgtcctgacatgcatgtgcaggtgtgcatgtgttggtgtgtgtggtgcactgtatgctcacctgtatgctgatggatgtgtgcctgcatctgcagggatgtgtttttatgtgcagcagtgagtgattttgtatgtatggtgtgtgtgtttaggaggagtttggtggcagcaggacagctccatagaaggaagggcaaacattacttcaactcagggctggcagtctgggttctgagtaggtgagcagaaagtcagagatgtcacagatcatgttccagggattctgtggagaagggagacaagaaaacctctgtcggatcatggagaggtgtgagtggcttcttcatagctgcatagacttttcaggttggtctggcctgactcccgtcagaggtctctcatcttccaagtaagcctggggtctttccttttttgtagcttccttcctctcaattctcccgacttagaatgcagacgccactccatcccccacctgcggaaaccctgttcaccccttaattctaagcccagatgtatggggatctcccagacccactgttgacattgttaccagcgttaaagtgacacaagcaggtggaaaattgttgttctcagaattcagggtcaaaaacccaacagaaatagttccctagagtgaggcgttcccagagaagagactcggcacccagatagtttcaggaacatttatctgtcagcggaaaatgtcaacagctccccaaattctcaccagttcttcccacagtgtccatcctatgtattttggctaaaataggcaaacacgcatttaatcttctttttttttcaccctcggaataggttggcaaacaatccaataaggtggttcccaatgacctactttgcccatcaagataaccagatggataatgatttcttttcttttctttttttttttttttttttttgagacagagtttcgcttcgctcttgttgactaggctggagtgcaatggcgcgatctcggctcaccacaacccccatcctgggttcaagtgattctcctgcctcagcctcctgtgtagctgggattacaggcatgtgccaacacacccggctaattttgtatttttagtagagacagggtttctccatgttggtcaggctggtctcaaactcccgacctcaagtgatccacctgcctcggcctcccaaagtgctgggattataggcatgagccaccgcgcccagccatgatttttaatatctgattatttaaaccatctgacaggccacttgacttaccaattgagtaaatatttaccaagcacctctcatgtgccccaaatcaaaccaacagtcctgtagatggttggctcaaccagcccactggccaggccagtgttttgaagatgaaggttaaatgattgagagcccataagcacaagaaagtgtccctggtcccggaaaccatgttctcaatttttgcaaaaaagtctaaatttgtcttcaggctcacttctttatggtctcatctaattttcatcattgtgtggggcctgtgctaatttccatgctgagtttagtagcaaaggaagcatatatggaggataccacccaggacttttgagtcagccaagagagcttcagaaattcctcctttgatttccacagagtcgagagaaatctttgtcttttctcccacttaactatcaacacttcaaagcccagacctacataaaatacacaaatgctttctggacaaaatgaatcttgtccgttttctttgggtttcattgggaacaataaagattgagctacaaaaggttggcaaagaggattatcctttttctttctattaaacatagaggcttcaaaagaacagctcagaaagtcaaataattgtatccaccatcgctcacccatccatctccctgctgacctggcctgtgaaatcccctttaaaaacttagccagctctcacctgcccattgcaaatgctgtattgttaaatgttcccatctataattccatgagggaggctgctataaagcaaactccttccatttcaacggagcatctcgtcgcgcaatagctctttggggtgggagtggtggggtgcctctaattttcaaagctttgtaatctcttgttggaaagggagctacttggaaaccagaaatgggctgtgaatagagttatagccacaagctcttgcagtccaaaggggctggtggggaggacacggagggtaagattttggaagccatttttgatcttcatgacaatttcttgattttgtcggtttggaagacacatctgttagtttttagctatggctgtaaacacaaagtctcagacttgaagctgacctaattcctcgtttggtttcagaccatagcttcctcagaaaattcctgtcagccattttgaagagcacaaaatggctcctatatgccaagagatagagagaatttgctatttagggatttttttttttttaagatagggtctcccttcttcactcaggctggagtgcaggggtgtgatcacagctcactgcagcctcaaaatcctgggctcaagcaatcctaccacttcagcctcctgagccattggaaccataggggtgcaccatcatgcctgactaattttttctttttttgtagatacaggttctcactacgttgccctggctggccttggaaactcctgggctcatataatccaccagccttggcctcccaaagtgctgggattacaggaataagccaccacgctgcctatttagagatttttaaatttggagttgaacatttaatagcagcattcaagtctggaataatttcagttaagaaagaaaagaatagaaatctaaccttctaattggccaaccctctgaaattctatgtggaatgatcaacaaaggaagacagttttgagttgctgggtcctctctacggggtcagaaaagaggcctggttcacctggctctccatgttttccctgtagagtccttcaaacccatggtctttctctaccaactttgaccctgggtcatcatctctctctccaatcaccattccttctctttgaaggttaaaaaaaaaaaaaattcaggccaggcgtggtggcttacacctgtaatctcagaactttgggaggccaaggcaggtggatcacccagggtccggagtttgagatcaacctggccaacatggcaaaaccacatctctactaaaaatacaaaaacaaaaacaaacaaacaacaaaattagctgggcatgatggtgtgttcctgtagtcccagctactcaggaggctgaggcaggagaatcacttgaacctgggatgcaggggttgccgtgagccaagatcacaccattgcactccagcctgggcgacagagcaagactccatctcaaaaaaaaaaaaaaaaaaaaaatcagagggaacatacaataagccatatttaatggagttctgaattatgtaaatttgaaaaaaatgcaatctaaaaattcataaggtctcactatttgtagtattcaagataatgtaagattttacatttattcctatgataaattaatcagaattttgcaaagtctttaggaatgcatctctcatgtaaagtgtagctactttgtagtcagaagtggcctgtggcaatatcgtgattaggctggggtaggggttaggggtgctgccacttagttctaccttcagtgataagaagagtagacagcaagccttggcaacatagcaaaaacctgtctcttctaaaatacaaaaaaaataaaaaagagagagagagaaaatattcgctgggcacggtgacacccccctgtagtctcagctatttgggaggttgaggtgggagaaatgcttgagcctgggaggcggaggttgcagtgagccgtgataatactactgcactttagcctggacaacagagtgagagaaaaagaaagggaaggggaggggaggggagggagaggagaaagaaaaaagaaaagaaaagaaaggaaaggaaaagaaaagaaaagaaaagaaaagaaaagaaagaaaagaaaagaaaagaaaaaagaaagatggcgtctctctgggaagattttctgtgaccagagtgggactgggctggtatgtcagaatctcggaatatttgacctggaaagtattatagataccttcaagttccacttctggattttaccaggggagaaatgatggccctagagaaaaataatacagatcaagaaattgccatgtcataagcaaatggcaaattcagcccttaaacccaggacttttgattcttgctctagctgcctgtcctctgggctgacaagctgccctgttataagtaaatggcacttctggagccagccacttgggtctcaggtgtgtgtgatgagaccctacactagaatgacagccacaaaagagctgcaggtggctgggccaccttagctcatcctgtccatgaaggggatggctttcaactgtttcagggggtacaaaaaggcattggatcatccccacagtgaggaaacccctccccactccccctaccagatagctgtcagtgctgctgagaagcctaccttggtctccctccactccagcttctgcaggccaagtggccattgttgttagattttttgccctgttgtgccataggccctgacctgcctacctgctgggcaacaggctgccggagggcgaggggcagcccttgtgccttgccccacatgagctgcactcatgctgccttccagagaagatgaatttagccttccacctgaatcctttcagaaacgaagcaggcaggcaggcaggcagcaagaaagctatagacacacacatacatgcaaacacatacaagtaaatttagccagagtgcttttagtctataaagatgttcagtaaaagtttaatgagtgaagaagtgacaaaaataccatgtattattagtatatctaggctcagacaatgtcttatggtatgtaaaccgtatctcaacaacaacaacaacaaaaaaagctactcaggaggctgaggcaggaggattgcttgagcccaggagttccaggctgcagtgagctatgatcataccactgcagtctaggctgggagacagagcaagaccctgtctctaaaaaaagaaaaagaaaagaaaatgtcagctatgtacaagggaatcttcactcaccagaggaagcccttggaaggttttgtgcaagagaatattataataatatgtaaatataggtagaatatttaaagaaaagctgtcgtgagttatttggtattgtgaggactcttcttctaatctacttgttttcatgagtatgaattttcatttattggatttttgtagaatcgacagatatattaacttttcaaaaatagagacgtgcccagattttcctgtcagttgttcaccaacggatgagatcccaaaaggtaggcaagattgatcgctaggttttagaagggtttccttttaagggctttttaatgaagcccattctaactgagattcccactgccccactgccctagcgtcccgttaatgacaaggagaggcagataaatgcctctttgtgccaataaatcaatggcatctctgcttctctgctgggactgtccaggaccatggtaaccataaggacagtgacccactgatcttaggccttggcaggcaaactagcctttactagtgatggtgtgtcctgttaggctatgccagctggggagagaagactaaaaccaatgagagaaaaacaagtaattttcctgttagtgaagagtgcctgttttaatcatacatttcatcgtcagaaatattatcagagatagaaataaaatgcagaacatagctgcgcattaattcactttcagtgtattttctgagcaagcgattgtatgtcagcggctgcattacagttgctgctctcaaagtactcacatttctagaggagagggatatgcctggctggtaaagtgatagaggggtggtaactgtgaacacttgtgatgccggggcttgttttatgtgctgtttgcatgcattaggtcaactaatcctgtggcacttttattgatgtccccacttgataggtggggaattcagccctgggggtccatggctagcaggagcacagccagcctttggccccaggcagcctgccctcgctccccccgccatgaaccgcattgcctatacacagcaccccgggagcccagaggtaagggtctccctcatatttgcttgtcacggacttggagggaggagttgaggtttgtctgccacatggagaagggaattagcaaagggaagatctggtggtaggaataggattttctgccccagaaaaccaggaaacaccagccgtgactctaatccctaccccatccctgaaactcacttcccaccctcaggctagatgaagaggcgggggtaggggggcatggcctttggcaccctaaccggtagcctacccctcctccaggccaagtcctcacctggccccatggttcctggtcccaggcagaccctgttgccacctgctcagatgtgtcacccttccttgtcccaaggacctggctcctaaacaatgtgttcagtgacgtttataacaaaggcactcttccccaatctatgttcagcaagatgttaatactatactacaaaaaagaaggaatgtacattttggaaacagtagtttaagtgcactgaagaagggttttgtttgttgttgtttaagtgcaggacttttccaaaacttctgtctgcaaatgtgcattacacgttcccagggggaagggaggaagatagagttatgcaatgcaatggaaattaatttcacccctcttggcatctggtttttcagggaacacctattaagtgacctgcagaatacagagtgagggctctaagaggaagttatgagaaagctgggctagaggattaaaggaaagcatcctgggaggtaggatatgaatgggtaggatttaatgcaaaaaggaggaggaggaaactttgcaattcagggcatggcctcagcctgatgacaaatgccccagggggacctcctaaagtcggttcattttgaataccggcaggagcagacgcaagctgccacccctcctgtgtaaggctgaggtagctgttccacagtttcctgggacttgccagcaggatgaagttccagttgttaaccacagtagctaacctcataatgattccttccttcacctgcctcacttcccatgttcttactgtattcatttcctagggctgccttaacaaagtgccacaaactgagtggtttaaggagcaaaaccttattggctcacagttcggaaggctaaaagtccaaagtcaaggtgtctgcagggttggttccttctgagggctgtgcaggagaatctgtcccaagcctctccccagcttctggtggttgctggcaatctttggtgttccttggcttgtagatgcatcatcccaatctctgccttcattttcatgctgcattctccctgtgtgtgcatggctgtctctgtgtccaatttttccctttttataaggacaccagtcatattggattagagcccaccctaatgacctcatcttaacttgataatctgaaagcaccctatttccaaataaggtgacattcagagggtgttaggacttcaatatcttttgaggggacacagttcaacccataacacctaccaacggtttctggaatcatctctcaaaataaactatctaaactctaatctttgtttcagggtcagcttctagcagaactcaatgtaagacacccttttaaagatggtacctcagaggtacagacagattgtgaaccttccctagcacagtgtaacaagtcccttgcaaaaatcctgatttgagtcaacattgtaatttcttgcttaaatctaagaatatgcctcccagcttcttccaagactatctgggggagttgtttctagggtggctcaatttattcgttttgaacgctgatggccgtgcaccacaccgtggctcaatgggtgttgaggacacgttcacatgcaataaatgcacagggctttgccattaggtggcattaggggaaggacacttccagcatactgcagaggcattctcttccagcctggttgcctgtcaagcacctgctgagatgactggcccagacggagattgtggggttgctgagccagccctgtcccctccttatctccggaagatggaataaatgcgtgtcagaagggagggtgcctcccatctcgggagcaccggggttgcccttcagaaaaacattgcctgcacattttgtagtcttgaaatgaatctgagtggcaattcaagcgggcagagcttgttttggattttagacagttctacctgcgtgctcctcttctctgctccagctctgacatctcggctccacatacagtggtctgaagtggcatacggaccctgagaagaggagaggcaaaggtggcagctgtggctggcccctcctgccttctggtctccttggctggtgagggaagaacaaacacagttgtgtttccaggtcacagctgccagggctccacctgtggggtgggtggctccagttctgttctgagttaagaaatgctgcaaatacgttctccttgaaagagacactaggaattgaccatttctttctgcagctttctgtagccaataagcatttgaggaactggagaagggttcagccctgaattgcaagggaaaactgtgtgagtgtgttttagttaagaaaaaagttaattctagtgagacctgcttgtttacaaaacagatgtataggccagacagatgtacagggatgaccttgactttcttttgtcattgcaggaaggtggggtatgtatgacccctggttaagaacaataggaggccgggcgcagtggcttacgcctgtaatcccaacactttgggaggccgaggcgggtggatcacccgaggtcgggagtttgagatcagcctggccaacatggagaaaccccgtctctactgaaaaaaaaaaatacaaaattagccaggtgtggtggcatgcctgtaatcccagctactcgggaggctgaggcaggagaatggcttgaacccgggaggcggaggttgtggtgagccgagatcgcgccattgcactccagcctgggcaacaagtgcaaaactcggtcaaaaaaaaaaaaaaaaaaaagaacaataggatcagaagtcggatggctgggtccatatatacctccacctcttctgactcccagttttccatctctgtttgaaaatgagtctgtaagcctctccccacctctgcctgttcccatcccatagcaccaggctgacttaggcagccacacagctgggatgggaagttggcctcagtgagcagatggtacaggggctgagcttaaaacaaaaatcacaaacatttcttggggggtatcctcaaggccgataaccctcttactagagtgaaatggaaaaccaaatgtgattgagctgcctgagcgataaaagcatttgctgttattctctgatttgctctgttcatggagagtttagtcataggagtttctattctcagaaactcacagcacatcacaatacgtagctcatttgtcctcaaaataattctgccctgcataaatgggtgtgtgtgtaggggggtggtaattataagaaaccatgtgtgttagaattgatgtcagtgctttgagatcatcagataaaagctaataaacaacacatatgtgtacaggccacctctctaattcataccagaagcgctggttgtaatcaaagcatggcatattttattttaaactattttataaataacctttgaaactgtgttgattgtgaaagccaagatctgatgtcctgttaaggaaagatgaaaataggctagaattaaagagcaatatgagtctggataaaagtgacaggaattactgtaggacaataaagcattgggtcatgtcaagttttcatcacatggagaatggaaagctgcatcataaatgctctccacctaatcatcctgagcattctcattttagtgcgatatattgtcctcttggaagcaataatctcatttaggtcatgagtaaaataagttgggttcagcgtttccatttcaagatatagagaatatttctccagtgcagcataagaaatagaatatcacccaggagaagctttacataggcagtgataatgtggaaaaatctaataaagagaacccacgtgccccagggaggagaagccctctgtgtgtgtgattgtcgtcaggtgagcagttatggcacactttgtagttttgccagtgcttttatgtaaattactgtatgcaaaatccacagccctcggggatgtgtgggtatggcctctgttactgacagaggaactgaaacttcaagaaggcaagtgatttgctcaagattggttatcagtagagttggggtttgaattccattcttctggattcaaatctaagctctccctctgcacagttacatgtgggcaggctgtgcatgcatatctgtggcctggaggagtggggtgagtaaccttacaggaaggaataccctgcactaaaatttgcacctaagcttccattattacgcctacttttcattttctgtttgttttcctcttagaggttaaattttccattcctgattttaacccaaagaaaggctaagtaaattccaggggccactcttgaataagggcagctggaaaaaaatacacaatgcccaccatctagcttaacaggatgtggacaccttcagtcgtggctaaatctatacagtttaaccctagcaacaatttcccagaaataaaacagctgctctttctggtatttggttagtctccagctgggtcaagtccctcttgatcgaatgcttggagcagggtttctcgacctctgcactaaaacacctggggccagataattctctgtggctgtgggcaccagggaggctgttctgtgcattgtagaatgttgagcagcatccctgacctctacccactagatgacagtagcactccccaagttgtgacaactcaaaatatctttagacgttgccaaatgtttcctgggggcaaaatctgcccctggttgagaaccagtggattggagtcatcatttgtgttgatcaatcactccgtgatgattaggccatgatggacaattcaggctgactttattttgctcattaggttgaccagaagactggcaattgatccactgctaagcactttcctgacacaagctgaaatgatgtcctcaggagccccgtgtgcgcatggcttttgggatggttcttcccaaggaggacagccgtaaaccatagaaagcaaccacttgactctgggtgtccctggtttgcaagtgcctcttgtgtccgccatctgcatttctgtctagatggtaaggttgagggaggtcagtttcagcagaaagtgcaaagagcatagattcatgaggcaatcagacctaaattaaagttttggctttatcactacccagcaacgtgatcttgggcaggtttcttgacctctctgaaactgtcctcttctttataaaatgaagattacctaccttgcagggtcattgggataattaaagaaaatgtgtgtaatgggcccagatggagctaggcccatagcagcactgtaataaatgttttcgattactgtacattttacaaaaatgaatgactgaatggaaaggtagaaaggccaaatagagtgtctgaggcatctccatggaggagggtgccagtggccatgtctgtctgtggctgatcgcaagactcttttgacagtccctgaagcctgtgctcatcttcagctcccttgaggccctcttcacctggcctcacccagtgtccctgctcttctgactcctgagggacctgagcattccaaaatagatgttaggaagatgtggattcatgtagaaggatgtcaaggcattgttggttttagcagttgatcttacctggggtgtgaaagacaaccgaagtctgtgagctgcagtgatagaaatgtgagcagatgggcaggataggaaggcacttcttgacgggagcagcaacagaagccactgcctttggccaggactgggggagacacaacagaacaggactggcagaagatgccacatcccagggtccccaagaccaagctatggcaccatcacccatctacagcaagatctgtagcaggaaccagggagaaaagtctagaccctcagtaaactatgcggccaggacagtccgaggtcaagccgtaaaggaggcttttttggcatcttttttcttctcccttgggcatcatggaatctgtgctgggtaaagaaccttggagatcccctttgccttgactcctttgtttcactggccctcagaaaggagatggcagaatcacaaagctggtggctgagccagaaagatattgtaggtggaattcaggttatggatagggttaggttccccttgaagagggagtactgagtttgttccttggagagtttgcggttctagctctgtaacccaggactgactctcagcccagtgctttttctgttgtgccaggatgcatcctcatcctatatcttattttaactcatactgtttccaaatcaaataccaacaacatttacaacctttactttcttatttatttaatgctccccctgaaagtagtaatttgccactaagaaagcctcccctgccctagaatactaaagaaaacgagaactaagcgaaagaggacctgtagtcagcgatttcactgtatcctatttaaaatgaaatggactttattttctgctttgagaacctaaaacaccacactttaaaagatgatatttatcatatcttacaaggtcaaagcatacttattggggaaaacttggaaaaggtagaaaagaacaaagagaaaataaaaatcattttaaaaaatgttacccccaagactgattagtatgttggtgactgtccttctaggcttggatatgtgcattttatttcgtaactgttctttttacttagcaataaatcatggtcatctctccctgtcatgaactatgtctctacatcaactttagtgcctgtaaaatgccgtaatttattttaccactgtcttttgtcagacatttagatggcttcatgtttggacgcattatgaatagtgtcactgtggacattcctgtgcatacatctgtgctcacatttgtggctatttctttggaatgcactcctggcagtagggttgctaggtctcccctcactgtcagtgtccccgctctccggggcctgcttttttcatcacccgcctccccgtaaagattcctaagttccagggctatctccttctgatggagatctcctgggtgatgtggtacacgtcacccacacccctgccaccagcctgctgtccaacagatggagctgataaccatttaggaacaatccttaaacttctaaccgactcagtccctgattagacttcttgtcttgccttatccctggttatgtcccttctccctcccaacccttacccacttctcagccccatgcaggaggcccagtttgtcagctggccttgctaatttctctcttggcccagccagagatcgtctaggttccttcttcctactctctgcccgctctgtagagtcagactctccacgggatggagatcttcaaggccagagagatgcaaaacctccttgcttcaggatccggagacaagctgctgcttttaagcagatcccctctcaggcaggttcaagtactgacccaaagagcaggggggttgcagggctctagtgattcttgtgtgaccccagcagactcaagctgttgcagcagtcagacatttggtgatacctacaaaatcatctagtccaacctctcttccaacagaactcacactcgatagcttctttgatgaatggaaatccagacttctgggaacactactgtgatgagcaactcactacctgcctacctacctaccttccttccttctgctttatttcacaattcttgccatacaaaatgaacaaacacacaaacaccactactaatgctattcattcatttatttattcaaccaatatttattatttactatgtagcaggaacagtctaggtgcttttgaaacaatcatgaacaaactgaaccacagcagcaacaaaatcccagatcccatatagaactaacaattaaagacggagacaggcaataaacgaggtaaactgaaaaatatgtagatagttgtgatacatgctgagaagaaaaataacacagagaaggtgcataggaagtgtcaggctggtggtgtggggatacagttttgggtagggtatgcagggatgtccttgctaagatggtggcattctagtcaaacccagaaggaagtgagcgagcaagccaagtgggaacctggagaagacggaggtggcagtgcagactggcatgttcctggaactgcaaagaggtggtatgagtgaggggaaggccagtaggaggtgaggtcagacgtattgagttctgggggtttggggagagagtgacagttgcaaacaagcttgaaggacattttgctctaagtgagatggaggtcaaggacttggagcagaaaagatacatgattatatgttttggcaggatcattctagcagctgggcaaggaacatgctgagggggaataagggcagaagtaggcattacttagtgatgtttgttcaagaaacatctgttgcgctcctatatgccaagcactgcgtaggtgataaggattaaacgggagcacactcttcttccctctggtaggttactgtaacaactactcccacctctgtcatttatgagtatttacccagtcccaagctctggggtgagcacacccgtccattattgcatttattcctctcagcaaactgtaaggtaacaacctcaggatatcctcattttacagttgaagaaactgaggcttagagaggttatgtaacatatcgtagaccacatagatactaggtagacagccaagatttaaacccaggactgtctcactccaaagcctgcaatactaaccacaatgctgttgctggaaactttttcttacgctggactttgaaagttcacctaagacagcatgagaagtgatggtatcttccaggcagccacctgggccaccagccctcccctccttgggatctgccttcccactttgtctgaattgagggtccaacactgctcctcggacacaaggtccaggtggggagagaacagagtccagcccagccaaggcaagtcacctgggctctctggaacccggactgctttgctgtagagtaaagtcctggaataggtctctaaccctctttccagctctgaaatccaaggcgtatgtgatctgaggtaataattgtcttgcctctcatgcttggtttttgatgagaccttcacattctttaataaacatttatctgtatccaggaattataggagatacaaaatgccgaggaatgcactactcatgatcttttttgatccttttaacaatccagagacatgggctgtgtaaagccacagtgcaaaatacaattaggaaaacacagcaataagaccactgtagctttgaatggtgctgttcactaattattacctccccacccattttctcatctgaccctcacagcagccccatgaggtcgacagggtgaggacattatccccatatcacagatgggaaaactgcagcccagggagctatgcgatttctcccgaggtcctcctcacactagtgtagtggagccgctatgtttattgaccccaaatccaagtcaacccaacagtctctagaacgttccaattacctggccagtcctcacttagataacatcggactctttcagaaaagattaaacaaatcctctatttgttgacagaggttttgctgaactggccctggggatccgaattgatcatggccatcaacacaggcagcaaagacccttcagaagtgttttattcactagccacctccatcccccaaccctccatcgtctaaagtgtctcctgactcagttctgtccccctgcttgtcctcttctcctattagctctgggtacccagtccagatcatagccccaagctctgtcatcattttgcagcctccagcctcccccacccaactcagcagagccctgagaagaaagtcctgggtcccggaggctgcacctgcagacacaacagattctgcaatggtgagagcatatagggtattttgggtctccagtggggtttttgctgattctgtgcctgaccagggcacatgcttcctggaattaataattctagataaagaagcctagcagatgcccacctatggaaaatgcttcttaaataagaagaatctcagaattaggaggccagcttcttgttctcagcactgcccctaactagctgtggggcctcggacacgtcacttgatgcctctggtcctgttttcttctgtacattatggaggatttggacagagatgatcagtaaggtcccttctagccagactgtcaaggttcaaatcctagctctgccacattccagctgtgtgatcttggacaagttactttatctttcctaagcctcagtatccccaactataaaatgggcacaatagcacctatctcatatggctgttgtgaggacccaaagatacaatgaatgtcagccctcagcacagggcctggcacagagacagtgctcagctaagtaactgtttctaagttgtttatgatttgaagctaaggatagagatgcttattctgagaagcagaaaggaacagatggagaaggaaaaaggaagatgggacaaaaggagaaaaactggccaggtgcggtggctcacacctgtaatcctagcactttgggaggccgaggctggcggattgcctgaagtcaggagttcgagaccagcctgggtaatatggtgaagccctgtctctactaaaaatgcaaaacttagctgggcatagtggtggacacctgtaatcccaactactcaggaggctgaggcaggagaatagcttgaacccaggaggtggcagttgcagtgagccgagatcgcaccactgcactccagcctgggcgacagagtgacactgcatctcaaaaaaaaaaaaaaaaaaaaaaaaggagaaaaattagggaaaatagggcaaaattgggggtggagaaaggcaggaaaaatttgagggcagcaactgcaataacttcaacagaaaagtagaacaataagcatacagccccaaaatactcagcccctttcctgcctccccttcctctctgcccctagcagacgccatgatagctcctggaatgatgccttttataactgtggggcatgttcctccaggctgacaccttctgggggggcccctgaacacagcatgggctcagccttcctcccacacacctaccctggtaggcatccctttgagatggatctgagtggtttcccacctccttctaggggtgaactgtcagttcaagaaggaggtttagggggatgggatgtcccctacctggggctaatcggggcttgggaggtggcttacgaatcgaagccgaagacagcagcctacgtgaccagaaaggaaaattcccctccctgctagttaagaagcttcacagaagctcaccagactgttgttttctttctttcttctttttttcctttgtgcacacataagcgtctaaattttgcaaactgttgcctacctttgtctctgagagcagtggaaaatattggactaacaaaaataagcaacagccagtgggagaataatagagaggcaaggtctcctggtctagttggcgccgcaggggttaagcctttctgtcggtgaaacaggctaacagcaccccctgagcctgctgacctcttccggctctcctggtccttcacacatgtcaactgtgagcacgctccaatactgacaagactgtcttacacctgaggcaattttcatagcacaggctgctaatttttcctccaggttttttgtttgtttgtttgtttgcctggtaaaatacacataacataaaatttaccctcttagccatgtttaagcgcacagttgagtggtgtcaagtacattcatattgttgcgcaaccatcaccaccatccgtctctagaattcttttcattttgcgaaactgaaactctgtacccatgaaaccataactccccattcccgcctcctcccagcccctgacaaccactattctactttttgtctctatgattttaactactttaagtaactcatataagtgaaatcataccatatttgtctttctgtgtctggcttatttcacttagcctaatgccctcaactttcatccatgtggtagcatgtgtctgaatttccttccttttcaaggccaaataatattccactgtatgcatctgccgcattttgctcatccatccatctgtcaatgagtgcttggttgcgtccaccttttagtgattgtgaacagtgctgctataaacatgggtgcacaaatatctcttaaagaccctgctttcaattcttttgggtatagaaccagaagtagaattgctagaccatatgatagttctatttttttttttttttgagatggagtttcgctcttgttgcccaggctggagtgcaatggcatgatcttggctcactgcaacctcccttcctggcttcaagcaattctcttgcctcagcctcccgagtagctgggattacaggcatgggccaccatgtccggctaattttgtatttttagtagagacagggtttctccatgttggtcaggctggtctcgaactcccgacctcaggtgatccactcgccttggcctcccaaagtgctgggattacaggcatgagccactgcgcccggccagtagttctatttttaactttctgaggaaccaccaaaccgttttccacaacagctgtaccattttacctttccgcccacagtgcacggcattccttctccacatcctcaccaacacttgtgattttctgttttttaaacaagtagccattccaacgagtaaagggtgatataaattttttaagaggcaagacgtgccaaaactaggatttcaaaaattgtaaatatagaataaaatagactattttaaatgtgacaaattaacaaattaattttagcctgcttatatgagttctttcaaagataatttctttttatttattattattattattatttattattattttgagacagagtcttgctctgtcaacccagactggaatgtagtggtgtgatctcagctcactgcaatctcggcctcccatgttcaaacagttctcctgcccatgttcaaacgattctcctgcttcagcgtcctgagtagctggaattataggcacccaccaccccaccaggctaatttttgtatttttagtagagacgaaggctggtctcgaattcctgacctcaagtgatctgcccgtctcagcctcccaaagggctgggattacaggcgtgagtcactgtacccgaccttcaaaaataatttttttttcttttttgagacggagactcgctcttgttgcccaggctggagtgcagtggcgcgatctcggctcgctgcaacctccgcctcgcaggttcaagggattctcctgcctcagcctccggagtagctgggactacaggcgtgcgccaccaagcccagctaatttttgtatttttagtagagatggggtttcaccatgttggccaggatggtctcaaactcctgacctcgtgatccacccaactcggcctcccaaagtgctgggcttacaggcgtgagccaccgcgcccggcctcaaatataatttctaaaggaagaaagagatagagaggggaagatagaaagaatgagagaagaaaaattaagaaagatgaggtcagatgacggggaaggtggagaagctttgcaggcagagtctggaatactgcttttggaaatgtgaggccaggccccgtgccttccaaatgcacccgatctttccgccgccgtaggtcccggatatatggatttgcttggggacattgcttgctttcacagggaggctgtgtactagcaaggacacaaagatgagcgctccacagttccctatttgggccagaaggtcaaaaaaaggggtggggtggtgggggggcacaggcagctaaactggctctgcctcctggggccaaaaggccagcttcctccctgggcctggctgcccagaaacctcggcgcgggcacaggtcagaggccgaactgggtggtattcaatcttgggtttaatgcattttaaaaactgcttttgaaggcgcaaatgcatcacagttctttcatttcagggaaaccgcctgtgagaaagggggaggtggggaaaacgctgagcccaggagggggctgccctgggcttttgtctaacaaagccgcagctcctcagcagcggggctcttgccctttgaaaaccaatcgggcaggaacccttcagcctcctttctgagagccagtcacatcacattttacagatctcagaaaagtgagccaagtccctgcgctatgtcactctgggtttgcgtcccatgtctctgacaccctgtttttctgagcaaacagcctctaggtgaacaacagtattttgcttctctcatcactgaatagggtcaaacttcccatggaattccactaccaaaccagatgaatagaaagaaagctgagagaccactaaatagggcattgctgctatctcaatgagagtgtcacctacccacaaagcaggcaggaaatctttaattaaccctgtttctagacacaaaagccctcaataacatttcatcctatttaaataaatattttcaaagaaggtgatgtgggaacacttttatttttgctattggagtgctaatttaatatcatatatagtttaaattatcatataagaacctataagcagagtttggggtggggaaggggggttggatccttctaggaactctcctttatctctttcatttttattccactgtgacacttccctcttgggaaattcctgccccggatttttattagtcttttgtctgctgtccggtgttaaaacctcacaaatccattacgtgcttctcggcgctgcctttcaagttacctctccacgaggtgtggactaatgaatcaaacggcaagggaagcagctgccctcagccctctcagaagaggcccggcccacagccatccttcagaaaaccctcctggcaggccctccctgggctcagcacaccctcgcttccctgggtttttattcggagctgtctgagctacaagaacatactcacgtacgtggcataaaaacacgcacgcacatgcagaaagggaaatacttgttgggctccatcagagagaatatttttcaaaaatctctcaatattgtcattatgtcaactgctaaagattccctgcttgacaaaaacttaatcaggcttccaaactttctcctaggcccatctgtgtactttcttgcaaaatccaggtttagcaaagaactctgcccagttagttgagcacaaccatcaaccttcaatatccggttcccctcagtgtctgatcagggtcctcatcccactccatcccccaggtgaggtctgatccccctggcctgtgttcagctagagtcctgttaggttggtttagccagaatccctctcactctttttgggaattttctatccattgaccccctactctgctccttggcataaatgcccacttgctgtacttggagttgagcccaatctttctgtcccactgcaagaccccattgcaatcatccttatacctatcatgacagttttgaatgaagtctgccttactgtgctttaacaggtatcattgaattatttttctttaacacatcttagcagtaaaattatcttcaaaattttcttagaatgtatgatcatcatctcttatagctgtatcctgatttccactttacaatagagtgctcatattatcatctcatttgtgcctttaacaaaccttttggggtaacaattgttatttccatgtgatagctggagaaactgagtttgaatgagttcctcaggggaacacagctagaaagtagtattgtggggctggcacacagtggctcatgcttgcaatcccagccctttgggggccgagtggggaagactgcttgaggccatgagttcaatactgacctgggcaacatagtgagacccccatctctacaaaaaaaattctaaaaataaattagtcagatgtggtggtagatacttgtaatcccagctactcaggaggctgaggcagaaggattgattgagcccaggaatttgaggccacagtgcacagtgatcgtgtgccactgcactccagcctggacaacacagtgagaccctgtctcgaaaaaaacaaggtagtgtggtgggagtaggacccacacttctcactgctagcctggtactcattctttttgataatgctgttgtgtcatgaaatggcactcaattagtgttgttggaatggtgggttgtgcctgcctcatagactgagatcggagcctactttggtcagtgcctccagtaaggttatgcggtttaagcattggatggaggtgccaggctgaggctgccagtgggtcctgggacttgcctgtacctgctccctggcagtgtgggtccagggatgcccacctggaggaaggggcatcagctggcctgaacctgcctgccatggagctgccttttctttcttcgttttttcttttgtttgttttagatggaatctcactctatctctcaggctggagtgcagtggcacgatctcggctcactgcaacctccacctcccgaattcaagcgattctctgcctgaacctcccaagtagctgggattacaggcgcccaccaccatgcctggctaatttttgtatttttagtagagatggggttgcaccatcttggccaggctggtcttgaactcctgaccccgtgatccacacacctcggcctcccaaagtgctggaattatagatgtgaaccatcacacccggccgttttcttcctttttttttttttgaaatggagtcttgctctgtcacccaggctggagtgcagtggcatgatctcgactcactgcaacctccatctctggggttcaagtgattctcctgcctcagcctcccaagtagctgggattacaggcaccctccaccacgcctggctaatttttgtgtttttagtagagacggggttgcaccatcttggccagactggtcttgaactcctgacctcaggtgatccacccacctcggtcttccaaagtgctgggattacataggcacgagccaccatgcccacccagagctgccatttctaactcacacagaggtatcagagcagcttgcagtggcccgcataagtggccagagctctttcctgggggttgcagggggtttctctgctgacccctcagcaggcagcaagccccataagccagagtgaaaggatgtggtagcagaaactggcctctgaagcgtgggaaacagatctgcttgccgtcagtggcatgcctgccaaatcatgctatccgcaaactcgaggcgggccctggaccggcggctgggcctgaggtcatctgggctttagtgctagttctgctgctgacactctttggttttatttttttcagtttacaaagtattttcacataaacagtctcagctgatcttcacaacaacactccgaaattgtccagtccctcgattttgctccagtgctctgagaggttaagtgacctgctcatgtcccgcagcacttcctctccctccgaggccagggcactttccccagagttgcctctctctggctgtggtgattcgggcaggtcctgtgtcccttctgaatttgacttctcatttgacaaccgagggggctggtgcaagaaccaaaccagtttcttgatcttgtgatgaaaacatgttttctttccactcacttttccatgttgctaatttctttggcctgacaatgcctgttctcttgctgtcttgagagcagcagagctgaggccacctgcccctcggagcatggtggtgtgtccttgcaggggtcagagtggtgtgtggatggcagtgggggccgtggaaggaggcttctggaaggcggcccacaatgactcttaaccctcccctccccagcctccagtcgttttctttcagttaattacctggttgttcaacctccttggcagctccatagtttctttccccacccccaacatccacagccctcttggtctcagagctcagccagaaggaggcagagagtaaaagtcatattgttttggtgggaaatagttaagatgaattatacccaccattcttggtgggttggatttggggctggtgacaggactgaaaggagggattcctgagcttgtgccccttaatttacctcccaactgccctggcgtcaaccacctagtaagccatgccgggataccctccccacgggagcctagcacgccagccagcatgctgacaaaaggaggagtaaggcagctccctaatctcaggcagctctcagtgtttcaggaaaggcaggtgtgtgagtgggtcgttttcctgggtctccctcaatccacaccctagactaggtttttgcttctgcttccacccccactacaatccaagatgggagcttccccacccaaaaacaaacctcagcctctccactttgtccttctccttctgcaatgtcaagcggtcaggccatcccattcattcattcactcaacaaatatttactgagctccccagacgcagcgccaggccacagcggcacagggacagagctgtgagcagggcgtgcaggggtctgtctgctcttggatgggctgagttggctgctctccctgcaagctcccttttcattttcaaatgccccccttagatcttccaataggtccacagaaggcagaaaagaccccaggtgagtgtgggttgtaaccaagtgaaggagtccatgccatctgcatccatgagggtgtgatgtgcctggttgtccctcacaagggggtgctgaaggatggggactaaaggattcaggacagggccagtgtttggcctgattgttatttcctgggttccctagataccaaatacctgggttctgccaatgtgaggctttcacctctgaacagtctggcagcagagcagcagggaatgagcccctccctggacagccaaggaccaggcagtccctcagcctcagtctcctcagctggagagtcatcccgcctggtttttcttctgaggttgtgagagacaagtgaacctctaaaagcccttctcttttttgttttgttttgtttttgagacagagtctcgctctgtcgccgggctggactgcggtggcgcgatctcggctcactgcaacctctgcctcccgggttcaagtgattctcctacctcagcctcctgagtagctgggactacaggcacgtgccatgacgcctggctaatttttgtatttttagtagagacggggtttcatcatgttggccaggctggtctcgaactcctgacctcaggtgatccgcccgccttggcctcccaaagtgctgggatcacaggcgtgagccaccgcgcctggctgaacagggctcttaaaatgctcctgccagagcaatccagacagtgcctcctcctcctccagaaacttgaccttggcctctgggctcccaaaggggaagggtgtacagaggggacttcagggagctggagaagcccctgctgtccttgtgactgagatggagctttaaggagcccccacaacacagtcagcctatagggaagaggaggaaacagagggaaggaagatgggcagggagctggtggtgtctgctgattgggggtaaaggaagtggtctctaaaaggccaaattacccccagagaaacaagaaaggaacaaagggaggactcaagactctgcctgtgtggggcacgaggaatgaggcttgagagagctgtgatctcacctgcgattttgtattctccactctgcctctgaaccccacggcccccggcctggcccaccattcaggctccccagccttgactcccacacggcaccagcggtggcagagcagtgggacacttgctgtgggcagtctgggcagcctctgttcaggaagcctcctgctaccactgcagccagccaagtgggcaagccatttctcctgttcctccggaagtggctaaggtgatgtgtgctggggagggagtggggaggggaaccccttcttggactcagtgcatgccctgggttcaaagctgaggggcactgctgcaaaatgctgtgcaaatataaaatcctttcatagttattgtcatcgtcatcactgggcacattgtgccacctcccagagcaggcactgccctgcaggtgatgtggccttgctatcttatggaagagctcctctaccaactagctgtgtgacctcaggcaagtaagttaatctctctgagcctctgactcctctatgagatggggagagtgtggcctattttctgagccagttctgaggattaaatgaaataaacatttataaccagtgttaggaacataggagatgataataaattccagctcccttgtgggaaaaactagcatgaatttttaacaaaatatcagaatcttcaaggttggtgggaaagcagggtagggagggggagggaggctatttttagggtctagataccaccaccctgagaagagccctgattttcttcactggacactgtggttgatcaactgaagtcattagcatattggttagctcactgggtgcggtggttcacgcctgtaatcctaacattttgggaggctgaggcaggtggatcacccgaggtcgggagtttgagaccagcctgaacaacatggagaaaccccatctctactaaaaatacaaaattagccgggcatggtggcgcatgcctataactccagctactcgggaggctgaggcaggagaattgcttgaacccaggaggcggaggttgctgtgagccgagatcatgccattgcactccagcctgagcaacaacagcgaaactcagtctcaaaaaaaaaaaaagaaagaaagaaagaaagaatattggttagttcctttgcagcccagtttgtgtggttactggatcagattaggcacctcagagagggccaaaaccatgagccaaacaagggcttacccagaccttccccctccccacattttagtttttcacccatccttgaatagacctgggctctgtcctaacaggctgtggtagcctgggccggataaactaccctcacctcatcttcccttcccagggtacgggcagcccaaggcctctctcccaggtgaataggcacacagccctttggatatttgtccagaaggattccttaaggtcactccatggtcctccatggtgctggaggcccgaggtcccagcctccctagaagttgttgctttcatagcagctaggtttcccctgctgtggagtcacggttctccactcttagaagtcagtccctggccccagccagcatgggctttgcttctggagaggctgaggggagaaaggaagggagtggcaactcttagtgcagaagtgtgtttggaagacacccagagaggaaagacgttcactccaccccacccccacagaggccagggcagattcagaacaaacccaggcaaagccctgaagaagctgccttgactctcaagcagcctcttggctgttggtgagggaagacccgccttctttcttgatcatcagagtcttgtgagcaccaggggggaatttatgggcctggtagctttaggttcagaaaggtcactgagaaaggagatgccagcttgaccccttcattccagagcacccagggatggcgttgtctccagtcgggtggtgttgggggctgaacctactgtgggttcatggtcatcctcaggccagagaacttttcacaggacctagaagacctatcattcatgctgagacagttcagaggttgagcctccttctaagagttgtccagagggtaaaaagaaaggtccccagaagtcttggttgagaggcagaagagggagtgggcaggttcttaggcagggatcacacacagtaaaagatacaggcaggtcctgctgcagaaggccccagatcaacttggtcagaggcctagagtcctactcagcacccaaccttgggttccatcgctgcctgccctgggcctcagtgtgtcccctttgaaatggggcagacaggagtccctggccaccctcacagaactgaatgcagtgacaggtatggtcctgtgaccgccccaccccaccactgcttttcctggaggaaatggggacagtggtgccatttgcaatgtggctccatctggagtatcacgtgcaccaatcaattcaatgagacccttgtgctcactgctggattgtgcgatgaacttactgcatctgtcctcaagaaatgtatggtttagaaaagaagtaagacatttcacacaaaatgatcagagcagtcattctgagtttctctttccgcccccacccacattatagacggcaccaaaatgtatgtttctcatgggcttgtatgaacccatcctccctctgctcccaactttctcccctgcgtcatgaaatcttttggaaagcaaatgagtaaaaatgattttaatataggtataagtttgactctacctgttttaatagaagtaagctatttccaagttttagtattctaactactataaatgacagtttcctttcagtgcctctttttgtttgtttgtttttgagagggagtctctctctgttgcccagcctggggtgcagtggcgtgatctcagctcactgcaacttctgcctctcaggcttaagtgatcctcccacctcagcctcctaagtagctgagaccacatgaacatgccaccacacacaggtaatttctgtattttttgtagagatggggtttcaccatgttgcccaggctgacctcaaattcctaggctccagcaatctacccacctcagcctcccaaagtgctgggattacaggcatgagccaccacacccagctcaacacctcttagtggataatggttgagaatcaatatatgtactagaaagcgaatctaagacaatgttataattgtgctatatgtcagccttgttgtttcacatgtaaatcttagagttttatcacgtcacaaatgttcccaagaatacacaataaaagtcaagaaattgtagcttgtcatgaattaaatgaattacttgtaaccaaataatttcaaaagcaaaattataaaaatgctttcaactgttttcatagaaaaataaatatatatttaatgtttaatgagcatttatcttcacatttgatttaatgcagggtgagctgaagagttaaaagggtttaaaaggtcttgcttaaaccatcctccaaactatgtccctattttctttaaaatcacctgagcaggatatcccacagtcactcttgtttacatgctccacagcctgaagtttcaggtttaagacattgcaaaacaaccttttagagctggaagagatcttgttagctggaaggctcctaggctggttgagcaggaggagagctctgggggtgtcaggggcaggttggggacaggagacgttcttaagagcagaagtagtaccagtagcgtgcatgctgcctcagtttttcttggtgtattaaagacttgtgtggcctcatctccactccttctccaactaaattaaccctattctttttatttttattccactttctaaacggtttcccattttcatcgccctgccaagacctcagcagctctctaaaccaaacactgaaatgctcaaagtgagaaaactgtttctttctctccagggcaggattgtgtcttaactgtggggctgccctgacaaatcacctttaactcacaggtctactatccttccagatctaaagaacgtcggcctaatcggttcttggcctattttggaacggggcatcagaccatatgcagtggccattgagtaacagtgatccagcccgtgctgttttggattctgagtccgctctcagcagcaagctagatgttttggtctggggcatatgaggcaaaagagaagtagaaaatgtggctctgcagtcacgaagctcatgccaaaggggagaggcacgaagcagtaaagaatgcagttgtgctaaattatttggtgcaggcaaagaactggcgtttgcagaagcccagtgcccctggagcaacctcaaccaatgggtagaatgtggactggcaggaggaaggggcattccaagtcagggatcagcggcagtccagacagggagagggtaggtgttggtgagttcccaaaggtgtggacctggctggatggaagagatgtggactggggacacaggtggaaagtgaggtgaccagaatatgaggccctaaaagccacatgatggggagcggggaggtctgtgatgtgatgcaaaaacaaacctgaactcctggggtgatttttgaacagggggaggcatggccaccgctgggccgtagtgtgtggcagatggaggcggatatgtcacatcatgtaatcgccaccattgtgtggtcacagaatcatggtcggggaaactagatcagcaggtctatggggcccttcaagctaatctggactgaactccttttttaaaaatgtctttttagtttaattttcatttccaattaatcccactcctccccgttttcaaagtaatgcacatgtaatttagaaaactctgaaagtacagaaaagaatacagaaacaaacaatttctcatccacatccccagagtaaccataaccagtgccacctgtttccctccagtctgcattttcacgtgctactttctttacatggttgggattaaacagtatgaataacccaactgtccattagctatgtgagtttgaatacttttagtaacaggatggtttatcttttttggtaactaggatctcactacatttttaggtatgccatgcctttttaaatagagagcaaaataaaaatgtttttccattatgaagtaatatatgcttatctagaaaatatgcaatattaaaaactgtaatactttaaatcactcataatccaactgttcagaaattaccactgtgaatattttggggtattttcttcgagtattcttccaaaataatatgcattttaaaaacaaaattggaattacaccatatacaatttgaatcttgctgcctttatttatcaaatcatagatgtttccatttccacctcacatttattgagtacttagcatgaaccaagctatttaaagcattttacccatattaatttacttattcctcacaacaactttttgagataagtacaactttttaatctcgccttcacagacaaggtaagaggcacagaaagtaggatttggagacaaatagtctgactccagactctgcgttcctgtccacactactgcctctccaattggtttttagtgaaacttccttctaccaatctgacccgtgttccactggtccttgttcaaaccctcgaagccccccaccaaacacacacacatacacaagtccaatctcttttccatgagacagcctttcaaataggaaagcagctttaaagtcctcaagtcttttctaagcttaacattcttatctctgctattcttcatgttccgaaggccctttgccatgttaggtactcaggcaggtctggttcttccatgtcccattaactgcgtagctagaaacaaatgcacggctgtggtgtaacctgcccaaggaagtctggggtcagcctctccatctgtgtgtgagagacatcagacagctgtcagtgtagccggagctgcactggcttttccatatagcagctgtgctgcagtaaacacagtgcttctccacattcttcagcccctcacagctctatggtctggctcgtctggccttttgattctttgcctggtcctgcagagcacagcccagaagaaaggaagagttgccaagggctttagctcagctgggctgagaactttcatgacatcctggtggggaccaaaatagtcatcaggacagaaggggagacccagggctggtcacaggattggcagcagggccagcaactgccccatcagcaccagcatttctccatatggcttccaagttttgcactaagatatcccaagaaattatcaagacttcagagccaggccaggcacagtggctcacacctgtcatctcagcactttgggaggccaaggcgggggaattgcttgaagccaggagtctgagaccagcctggccaacatagtaaaactccatatacacaaaaaataaaacattagccaaaagtggtggtgcacacctgtagttctagctactcgggaggctgaggtgggaggatcacttgagcccaggaggtcaaggctgcagtgagctacgatctgctgtgctggagcgccactgcactccagcctcctgggtgacagagtaagaccctgtctcaaggaaaaaacaaaaaacacttcacagccagtgtgccagagtccaagcccacaggagggatcagtgaggaaggaagctctgggcactggaactacacaaatggcactttcaagtcaggaccatcttccatctctgggtctgtttggaaaaaaagaaaagcagctttgtttgtctttcttctggcactgaccactggaatttgggctcaaggcaggctccaggtaaaattgtcaaggtcatgggctttgttcttaacgtcttcctcccttttgctttctcctggcccagccgctcctattttctctaagggtcctgatagaggagggagagtaacctgataatttcatattaaggcattccaggtaggcagaggtttaatttgtcacccctctcagagtaatatccttttaacagtaatctcttggattccaaaatgcttctatctaaaaatattttcagcaggaggagagctttcagctatccctcaaattacaacagtggggccaatagcctcttccatctatgtatgataagaacaaatactacaaatttggcactgtaacctttacatctttgccccttaacttccacacgtgtgagatgaggataatcataaaacatacggcatagggttttatgagaatcaaatgagataatgcatagaaagcccttagaatgaacctgaaacataataaaccttctatatgtgttagatgttattattattattattttgagacacagtctcactcttgcccaggctggagtgcagtggcacaatcataactcactgcagctttgccacctcagcctcccaagtagctgggactacaggcatgtgccaccacgcctggctaatttttctatttttttgtagagatggggtttcactatgttgcacaggctggtctcaaacttctcagctcaagagatctgcccgcctaggcctcccaaagtgctgggattacaggcgtgagccaccatacctggctgctagctattattatcactatgaattgttattttaatcacagagaagaatcctatatattatactattttatcctcacaaaaatcctgtgaattaagaatcattggtcctattttatagataaagaaagaaaattaagagattaagtatgcagctaagtaagacatgacacagagccaagagctctctgaaaggctcattctatttgcttggtagggcttggggagagtgcacagtgggccatccctgggcctggtgtaccagagggtataagagaagccaagattcagagtccaccctcaggaagctcagcagaatctgagaaggtgtcagcagcccaagaaaggcgccatttcaacccataatgttatagcgcttcacttctcaccaactgcttttcttctgaagggggaccccaggactattttccaggacaactcttcctgtttcaacatgtagaaaagtaaagaaaataatataataaactacatatacatacgttagtgtgtatttccaaaagataagcaccctttaaagaaaaaaaatatatactatactaccattatccctcctacaaaatttacagtaattccttaatatcatcaaatatcaagttggtgttgaaataatttctctgtctcatgttttttacttcacagttcattttatccaacaaagacagtttctctgtctcttgcatatctagaattccttcccccacagcccgacccctctctttatttctttgaactgtacgaagctaggttatttgtgccatagaatctcccacagtgtgaatttttgctgattgcatccctgtggtgtcatttaacgtgttcctctgcctcctgtgttttttctaaactggctgttgaatctggaggttgatgggattcaggtttaatgtagcaagaacatttcaaggtggttattgtactttcctcaggaggcttgtgatgtgtcctgctctttcttttggtgacaccaaaagccactgataatcattgcctagagcctctatttcattagggattatctttcctttttcatttgtttgctggaatatttctatagagagaaacttacccttgttaactatttggttaccctgataaatgcccaggataagtgttcgatttcttccctttatttataatgatttattatttatagataaaatgacatgatgcctgtgatttgattcaaaataatccaggggagaggggactgggtagggatatagaaaaacaggaagagccgtgagctgatcatcgttgatgttgtgcgacaggtgcacagaggctcattctactattccactcttatgtgtgtttgataattttataataaaaatggtggggttttttcccagtaaaaagttaagtaataatttggttccttagcatcctccaagggtgagcaataagtatgttggttggttggttttagggttgtgataaatgtaggaacataaaaatatttgacagttttgccgggtgcggtggctcacacctgtaatcctagcacttcgggaggctgaggcgggtggatcacctgaggtcaggagttggagaccagcctggccaacttggtgaaacctgtctctactataaatacaaaaattacccgggcatggtggtgggcgcctgtaatcccagctactcgggaggctgaggcaggagaatcgcttgaactcgggaggcagaggttgcagtgagtggagatcgtaccactgcactccagcctggggacagagcaagactccgtcaaaaaaaaaaaaaaaaaaaaagacagttttaacccatggcagtcgtttttcttatatgctcaagttgttccatcgttggccagtgggagcctcttcaagctggctcccaaatactttttgaactgagtccagtagtcttcgctggtgtctgtgctttcagcgggccaaggtgtcccatttgtgtgcatttccttcccagaccgggggctcagccagttttctgaagtagggctcttgtctttcactaaagatcttttctgtggcatgactctcatcattcctgcctggccactgttatctaaaaagatctctttgagcctccagttaggttctgtggccagaagcagaatttttctccccacaccccaaacaagtgtgcctctgccaccctctaaccccactaccgctaccctcccacccctacccaagcaggtgtctcagtgatgcgttgactgtgctggtgggtgggtggaagggaaaggagattaaggagattaaaatctgactttaaagtctcaggcagtaactttgcctgaggctggctcccccttcccagccccacccccagactcagagccagggagaagaaaaagagggcagtgagactattcagtatctctatccatctataattaggcagatttctcttgcgaatgaaatcagagagaaatatttaggaagaaggaagtggggtatctctggttcacacggctttatctagtcttccgggggtggtgaagggagagggtgtgcagagcaggcagagccctccagagacaagtacaagatgaaaacggcatagaagaccaaaagggcacaggccaggagcagccatcagatatgcaaggtgcaaccaagtagaagatgagagtgtagtggttaatttccaaggccagagctagcagatccgtgagtcagtgtgacaaggaggctggtgaccagtaaaaccccccagcaaaggagtgaggggctgcaatgtgcaagaaggggttccccttcacagtgagagctcctcaaagtctggggggtctccagtcaggaatgcttaggtgaggggtttctataccctgaccagacacacatcataatcttgcagagcacagtgacccttggctgaaagagagaacgtggacttgcctgtggcagagcagaaaagacctaggactcccagttctgcacgaactccccagctgtgtgaacttggtctgggctgttccttcccatttttttttctaatgggaataataacagcgcctcattctcaagctgcagttggggttgaaggagttggcgagaagctctgtgaatcactggctgtgagcgcggctaaatgacatttctcctagtagcctgtgggcgtgggtggtctgcaggtaggcaggaagcaaccttattttcgaaacaatatgcaggttgcagctgccctcagatgggccttggaggagagaaaggcccagagagaaggagatggcaagcagggagcaggagaaaccacacttgccccctgggcggtggagggcagctcgggacagctggctatctcaggtcagagaaccacccagagggtgtaagagggagtgtgaacacagaaccacagctcttcaaggaaaggcctcagaatagatctccctgtaagactacagatgggtgtgtgtgtgtgtgtgtgtgtgtgtgtgtgtgtaaaacttgaagaagacgcctaaggagtagacatctgatatccttcaaggccccagctgtagaatacttgtgtgggctggagggcaaaggtggtcaggccagaggagcaggtgggcaggggctgccgggaaggccaaggaattccacacactagcaaatgttcactgatctttcatgcaggcaacacaggtgtggacacacaaagaatcctctctaggccatgggggtcactaggccatgaggacaccaagccgaacaggccctcacagtgtgtgggagtggcaggatcagacacaagagggtcagacacaagattagtaatgttgtgtctccctcaagaatatctgcatatttagagcgcttccaacagatgcctttgcccactttgattttacttctttaaagaaaactgtgataaatacacaatctgcagtaggacctgacttcaacagccagcaaaatcctaatagatgtgcaacaataccctccctcacccagctatgaaacagaattcttcgcttcgttgttactgtccccttgaaaaaaaaagtccacattttgctttcttaattgtaatgcatttaaatagataaaataaattttgctagacttgctttcccgcatgtgcacacactgtgtgtgagtgcatacaaacacatttggccataggcataattctgccaacctgaactgcagcctaaaacacttcctaatttttttattgtgagcgttttatcaggacattgaaaatagtacccccaagaaaatataagtgaatgatctttgatctcaaaatgaggaaagattttctaagcaaaaatctgatgacttaaatttcaacttctatgtgccaaagacaccaaataaaaggtagatggtaaagagggaaaatattcacagtatataccataggaaaaggatgaatccttaatatgtaacacgctcttagaaatcatttagggctggacacagtggctcatgcctgtaatcctagcactttcggaggctgaggcgagtggatcacctgaggtcaggagtttgagaccagcctggccaacttgatgaaaccccatctctactaaaaatacaaaaaattagttgggtgtggtggtggtcacctgtagtcccagctactcaggaggctgaggcaggagaattgcttgaatccaggaggcagaagttgcagtgagccgagatcgcactactgcacttcagactgggtgacagagcaagactcagtctcaaaaaaaaaaaaaaaaaaagaaagaaacagaaagaaaaaaaaaagaaatcactttgtaagagggtacatcaaaagaaaaataaagccgagtgtagtggctcatgcctgtagctccagctaccctggaggctgaggctggaagatcgtttgagcccaggagttcaaggctgcagtgagctaggaacataccactggactccagcgtgagagacagaatgagacccccatctctaaaacacataaacaaaatataagcaaaagtcatcaccacacaattcataaaataggaaatacacagggtgaagaaaacacatgaaaaaaatgttcaacattgctactattcaaaaaaatgcaaattttaaaattagactatttttgcttactgggtaggttgagttgttttgtttgctgtgtgtctgtttaatgataatacccagtgtggtgagaacacaatgaattagagtctctcaaaaactgctgaatgtaaattggttttgtctttctggaaagtaagtcagccctaagtttaaatagcccagaaaatttagagctgaattactttccagaaagatagagccaattttctttaaatttaagggtgagttactttccagaaaaatatatttgtcttttagggtacatgtttccatgtgtcttaatttattctgaagaaataatcacgctgagcgcagtggctcatacctataatcccagcactttgggaagccgaggcaggcagatcacgaggttagaaaatcaagaccatcctagctagcacggtgaaaacccacctgtactaaaaatataaaaaattagccgggcgtggtgatgggcgcctgtagtcccagctactcgggaagctgaggcaggagagttgcttgaacccaggaggtggaggttgcagtgagccgagattgtgccattgcactccagcctgggtgacagagtgagactccatctcaaaaaaaaaaaaaaaaagaaagaaagaaataatcagtggaataaaatatttgtgttcaaggatgttgactgcagcactataatactaaaaatcaacgataacctgcatttctaacaataagggcatagctgagtaaattattatacatagcaatacctcaaaatagtcaaaaaataggtaatactaagaaaaatcaaacaaacacaaaccctaacatatgatcctaattttgaaaaaaaggaaagcagtagaaaaaaacattagaagaaaatatagcaaaatgttaaagattatgtttgagtggttggtttttggctaatttttattttcttttccacgcttttctgtattttccttgtttctttttttttttttttttttttttacaattaacatttttacttctgtaagcccaaaagtcatataggaaataaaaaaaatatttcccccagttttggattgagaaatcaaattcttcctcatgttacccaatgaccctggaaaaggcaggtttgctgggggagaaataaggagttctgcttaggacaagtagagctgagttgtccgttagatattgaatggatgttcaagtctggatttcaggagagaactggggctgtagatctaaatggtggggtcaacagtatacggatgatattttaaagtactgagaaaaggccaggcatggtggctcatgcctgtaatcccaccactttgggaagctgagatgggtggatcacctgaggtcaggagttcaagaccaacctggccaacatggtgaaaccccatctctactaaaaatacaaaaattagctgggcatgatggcatgagcctgtaatcccagctacttaggaggctgaggcaagagaatcacttgagcctgggaggcggaggttgccgtgtgccgagatcgcaccattgcactccagcctgggtgacgagagtgagactccatctcaaaaaaaataaaataaaataaaataaagtaccgagaatgaatagatgaaatcacaaaagaagtgtgtaagattagagaagaggtccaaggcctgagtcttgattctctccaagacatctaggagaggcagagatgccatccaaggaggctgtgccccagtgaccataggaggccaatcacaggctttcaaacagctctgtaatgactaggacatatttattctagaacctcagatcatttgcttgaacactttcctttatctctcactctgctttcaggcctaattattggaagaaaaaaaaaggggtgaggaggggagatctgcattgttcttgaaaataaaatcgcttggaaaacagaaaatgtcagattaaaaaatgcagagtcaatgcccgtgactgtcttaatgagtgtagttaagtgtcccaacatcaacaagaaccacttaagcatactgggaagtaatccaatgccagaggacagggaaagactcgatttccttctccagtgaattcccttgtttaactggatcttacaactgaaaatcaaatacgtctccatcttccaagacaactccttagctctgtgggcccatggtttggatctggacatttggacgatttaaatggactcagtcccacaaatgtataaatgcttcttgccaaactttgggaggctgcactttttgggaggctgagggggggcagatcacttgaggtcaggagttcaagaccagcctggccaacatggtgaaaccctgtctctactaaaaatacaaaaattagccgggcactgtggcacacacctgtagtgctagctactcgggtggctgaggcatgagaatcacttgaacccaggaggtggaggttgcagagagctgagattgtgccactgcactccaggaaaaagacaaaacaaagcaaaacagatcacgtattttttagtggtaggaactcctgttttttttttttttattgcagtttgctcttctctatgtttgggaatgtagcttcctttccctgcttggaaggaaagagagcactttattttttggttcccttaattcacaacaaatcagccgggtggagcatctcagtctaggagcgactgcatgactgggaattttagccactgtggatttgttggttacaatttagcagaaggcagggctaagaacaaaggtgggtaaagaaaagtgagggttctcagccttggtttccctttactgggagcaaagtatcaagggtagaaataccagcccttcccaggtgtctggtgagtgcctgagatgagccaggtgacctgagctctctatgcaagtcactgactgtaactgaaggaagaagactctaaaacagttcctgctgggctaccaggaggctcactttgaggagtcttcgaattaaactgattgatggtctctctgtgtctggaagaggtgttttggcttcatgtcagagctcccatcagagaggcctgagctatgagaggtttgaaaaatgattcagaagaaaaaattgactctgttcaataataaattataacgatgctttgtatttatagagcatccttcaactgagggagtgcgaagttctttatgggtattaacttgcctttctcacaatagagaaaagataattttgtcaattcaatatttgtgtatcttttttctttccttttactgggggaggaggacagctattacagggacgttttcttatattaatttggaggcaataaatcttcccctcattttttttttactggaaatcttttctcattgggtatcacataaagaattaaaaataaatagctatgcctaaaatgtatgtgtatgtgcatttatatgtcggtgtgagcgtagtatcttcataaatatttaatttttactgtctaagccttctccctcagttttcatgagctagaatttattcgccactgaacactgaagctattattatttgcttttgcgcctaaatgatttaaaagtcaattatgaattggctaaggggattggagaactctggcatgtaatacgcctctcatgcttctatttgttaccaaatgtctggaatgagaaagtgtccatgatgggaaatagcccacagaagtaccataccgttattaaaccgaccagacggaggccctaggtcactgggatacgagcaaactgtgctggggttcatgtgggtgggttaggaggctggggagagcatgacaggggatgtgcagacagacaaataaatccgataataaagcagaagctcagaactgtccaaaatgatgactgaaagccagcagcccaaggagaggctgctcttaacagccagcccccaacgcttagggctgtgctctgcaccaacctgccctagtgtcctggggagggaacgtaaacagttcagcgctttctatttaactgcaaagtgctcatcttctgagtcaccgaggcaaagaagcaggctggaaagtagtaataatccaatccaacagaattatctgttgaacagaaaatcccctttggaatttgtgtccttggaacgttccaaatggaaaatgagagttttcaggtgggaaagcaaggcatggtttcatgagtcagggtgactctgcgtttgcatgaagggccgcagaaaagcagattatgttaaccttgaaattagccaggagcgaatggcaaatctttgttaacaagcttggagtccacgataaattttaaaagtgcaccgcaatgagcatctgtaataaatcttccgttgcctcctggttcaggtctgggactgaaaaggataaaggggccgggcgcggtggctcacgcctgtaatcccagcactttgggaggccaaggcgggcggatcacgaggtcaggagatcgagaccatcctggctaacacgtgaaaccccgtctctactaaaaatacaaaaaattagcagggcgcggtggcgggcgcctgtagtcccagctactcgggaggctgaggcatgagaatggcgtgaacctgggaggcagagcttgcagtgagctgagattgcgccactgcactccagcctgggcgacagagcgagacttcgtctcaaaaaaaaaaaaaagaagaggataaagtacttctagaacaggagctaggcctcccgaagcctttgcatgttaactaactaatcaaggggctccagcctgttgggctcacattgcctggtctttactcacttgactttccacaggcctcgctcttgaaaactgaaattgctgcatggcattcattacacacacgtatgtatatatgtgcatatgaaaatacatttgcataggtacctatccatatgtatatacacacatacacacgtttttcctcataaatgaaactggattaaattttatttccaatattcaggtgactcttaaaactgaggggaaaaattggggataaaaagcaggacaaggcaataattatcctgtagcttatctcaaaatggaaatttccccaacaacattagttctaaattctaatatttaaaaaaaaaaagacgaatgtggtacagtattaaaatggacttacatttaatacacagaacatctagcagcttggatcagtacaaactgattttttttctaaaggctatcagagttaattggcaaatagtcagaaaactgtgcaagggggaggaattcttctgtttgtgcatttgtttgattttaggtacttctaagtgctgtgattggtagtaatactgagatctgtgctgagcctcgaactccaaagttgcaactcaaatccctgatgaagttaattaagtctgagtcttgggctctgcagctagttgatgccagaataaatctaacgtgttgtcagcagactgaaccagaagagcaaagctccaaagaggaatttctatgcagtaaatatcacttaaattcctctcaaagttggagctggtgtcaaagtccagaaaagcaatattccctggcaattgctgtcaggagtgtgtgcatgtgcctggccatgcatcatctgaacactcaaattagcagaggaaaaagatagtgagttaatatcacccagctgactgctcaaagaactgctttaactgtagccagagaaatatggagggggcatggccagtcatcaatgacctccaaatgactagatgctcagaagtgtctggcagcctaggctagataaataattcctgctgctgtgaaataaataaattcccccaaataattcagggaaaccaattctttcactgcccagttgctgagctacaagaaactagagcaacactacaggtgaagaagaaagaaaggggctgggtgcggtggctcacgcctgtaataccagaacttttggaggcctaggcagatggatcacctgaggtcaggagttcaagaccagcctggccaacatggtgaaaccccgtctctactaaaaatacaaaaaaaattagccaggcgtgatgccgggagcctgtaatccagctactcgggaggctgaggcaggagaatcgcttgaacctgggaggtggaggttgcagtgagctgagatcaccactgcactccagcagcctgggcaactgaacgggactccatctcaaaaaaaaaaaaaaaaaaaagaaaaagaaaaaaaaaggaaggtggaaggcatctatgagtgactttctatctcactgatctccagtttataagggactggccactggaggcaggttggcctagcagggtggtggggagggggctggcgccttctccaacaactctgtgtatgaggcttgtaaacacatgattctctgtctggataggtctctgaaggagaagaaaggaggtggggaaggaaggaaagaaataaatatatggacaggaagattgagtattggagggagaagagaaaaagcaagagatggtgaaaccaataaaaaggaaataaacgtaaaatggagacagaggggaagaaagagctggaataatactatgtggctctctaaaagttgctgcagtttttttttgttgttatttgttttttgtttttgtttttgttttttacagagcacacactgcagataaatagtgcgatcttggggccttttcggtaactgtacttctattcttctttccctttgcttttgtctaattaaaagtgtctgcctttaaaacagagacaattgaagtttcaagttagtgttgtcatcttctgtccccaggcatttcagagctagaaaaactacaggcaaaattctctgtagatcctttttgtacccctcttcttctactcaccctgtttccccagctttctacttttagaataggagtgggggctgagaaagataaaaatagcttttgagaattcaagttatttgggcccctgttttgggagccagcatccttgtccaaagcagaaagcagccagtcctgagtttgagggaagcttctccccatggagtttccttaggggactatttctgagccgttcttggaggaagcaacccctagagatgttcagaactggaactaaacccatcttcccctgaagaaaaacaggtttttaggaacccatcactcagcagggagccctctgtgtttggagccaagtgtttggggaaacaaataagctgccttcaatcagcctgagttggaaacgcaggaaaaccgcatcttcatgctggactccactgcaatcccaaggtgattttagttcaaggagagtggcatctgcttgggggaaattagaaacttcttatttccatttataaattaggctttactaaggaagagaacttaaaaacagttttattgttgtccactgaaaagacaattacttccagccacaactggcacattccatggtaaaactagcgcaatcaaacacacaacactttccaccgtaggggcttctttttgaggctgtcattaaaggcatgtgtcttattagccagtgtcaggatttctgggatgttttattgtctcgagtaatgagaaggccatttccagggctgtgtgctttttaagtcagcaaacaaaacattaaaaacaaacaaacctccttttctttgtcaccatttctctgaccatcccctgtaaattcgtaggacatggtactcacagaaaaaggaaaattcattagccgaatgaatcgctgatttaaattcaggcaataggttgacattatccttaattgaatagttttagaaaatgaatctatgtagatccagatcaaattctaaccaatcattgcaatggggtcttttttcttgaatgttcaaagttgattttcctccacaaaataatgactctttggtgtccaagtaataaattagcacagttcagttcaagttcccactaaattggaggctgaaatgtaggatcaagagaaaggagatgcaagttacaaacctagattctaaatatcccagcagactaactccatgaaaccatcttttattttttgtgaataagtgtatgtgtgttagcctccctctccctttctccttttaaaaaaagaaatgatgactttttcaggtctctgcttccagatatgaggggctttaggtatttgaagtcagaagggaggcaggaatgagcactgctaattgggtgcatcctggtgtgctaatataaaggacagccaatgtaatcgtgggtttctgagtttgctgtctgtacctggcctgcctggagactaagaaaggcttgctggccccaggccataggtcacattgcagccttgactgtaattccctggacaattcctgcaccagaacagatagtgtgacctcctatgctaaccagccgagagcaacccatgctcagtggcaacgcagaaaagccacaaacagaacccaggaagggttcctgggatggcccggcgactgcccatcctccagagagagctggatcaagcaaaagaagcagtccccaaattcttagggccagggatgccaggtaacctggcacccaaggctatctgaggagacaggcaatgaggctatcaagagtaaagatggaagagcaagcacagatgatggagaaaaaaataaggctggtgggagggaattaaggagggaaatgcaaggaagagacaactgagaggaaaaccagagggaaggagtgtatcagtctgaagacaggatgacacaggagaaggggaggatgagggccggaagggcttcaggcctgcagggagggagggcagacttttccagggggtgggagaattgccctggcccccttttactggtcccattctttggacattgtagagagaactcaggtgggggaaatggcccagcggcgggaaccctggcacacctctcccagcagggatcggcccccaaaaggaacagttctcctccttttctggcttagaccagggcaggccccctgtgcagctctctcccttgggttctcgtgtatgtagatacacttgtttacacacacaggctcctacacaggcacatgcagagacgcctaggtccccaacctgggttgtgacttctgtgtcgaggagagccataggaggcacagctttgccagagttcctgcccattgctgcggcctgttccctaaaccacactggtctggcttcatcgctggactcactgtgtggcccacagaggcctcttctatggtcacagggccccagtgacattttgggaggggcttcagggatgctggctggtaacccaagagcaaccctaaatcccaacttggtccatgtcctagaatatcaaaggagaatcttaaaccctgagtgggatgaggagcctcctaagcttgaagggagccaggtggggagagggcctgggctccatgcaggttgggcatcagttaacctgtgacagtggccaagtcccatgagacttacaccatgctaaatattcagctttcctcctgtgggcatcctatactctgtgaattggtcagaaccaatctttaatccagcatcctatcaggcacacctccctcctgctgctgtgtgcctgaagaatgtggagtgatttagatattcattgacctaaagtgcaactaaggtctgagggtgggggacacaaaagggaggttaatacaaggcatcaaaaatgtactttgactattttctcctttttttttgagcctgtcgcccaggctggagtgcagtggcgtgatctcggctcactgcaacctctgcctcccaggttcaagcgattctcctgcctcagcctcctgagtagctgggactacaggcgcccaccaccacagccggctaatttttgtatttctggtaaagatggggtttcaccatattggccagggtggtctcgaactcctgatcttgtgatccgcccgcctgggcctcctaaagtgctgggattacaggcgtgagccaccacgcccggccgactattttctcttatttcaaaattacatattcttatacactatggaacttggaaaataagggaaagcataaagaaaatttaaatcacccataatttcacaaaccagagatgaaaccactgctaacagttgctgtaatttcttccagtctcttttctacagtgagatctgtatttctagctggctacacatagtataaatctaggtttagaatcaagtagaaatagctctagagtgctgccgatgctgccattggctctgatagtggatctcatttatccctgggtccaggtgagaggtcctgaggacccaaatcatgggacaacagagagaaaaagagaagaggtgacatgcctaggggcggcccggctgagtttggaagccgcaaggtgaactccctcccatgggagaaagctgccatgggaggcggcagcccagcagtctgcctctcagcccacgatcgcccacgtccccagcatgtccccagcgtggcagctgcaggcacggcaggctttgtggggcctttgatccacgcaaagtacgtcataggcgaatgctcacagcgcgtgggctgggcacaccaagggttgccaaactgacaaacacacctccaggaaagccttttggctctggctgggcttcattctggctgcctggacagcatggcctgaataggaaacttgcaaatgtgtgtgccctgtccccctggtgtctcccagcccagactcaggagtaactcagagataactccccgagagttgaacaatgagaacacatggacacagggcggggaacatcacacaccagggcctgtcggggggtcagggggctggaggagggatagcattaggagaatatctaatgtaaatgacgacttgataggtgcagcaaaccaacatggcacatgtatacctatgtaacaaacctgcacgttgttcacatctagaacttaaagtataatttttaaaaaaagaagaaataactcgccgaggccgtgggagtagttagtagtggggcatggggccagctgagaagctggctctcctttctgcacattttggcacacagggcagatttttctgaagcacaggtatattgcccttcaacatctgagacatacggctcttggtcataatcttatttctttttttttatttttattttttgagacagggtctcactctgtcactcaggctggagtgtagtgatgtgatcttggttcactgcagcctggacctcctcgggctcaggtgatcctcccacctcagcttcccgagtagctgggactacaggtgcgcaccaccacacccagataatttttctattttttgtagagacgggatttcgccatgttgcccaggctagtctcaaacccctgggctcaagccatcctcccacctcagcctcccaaagtgctgggattacaggcgtgagccaccacacctggcccataatcttatttttgttcaaactttcagaggattagggagggagagtagaaaacacaggaatgatgccaggaaacctaccctgggttcagccccaaagacaagaattcggggaaaacctacctgacttgatcatttattcattcattaaacccttatgattgcccactgcatggtggttagctggggagtgaagagtcaaagaagaataaaacatatcccaggctttgtggaattctcaatttttaacggggacagacctgtcaccaaatattagtgaaaaatgtgccaagaactacagagcatctgaaaagttagaaatattaccataaacttactttaaaacagaactttagccacattttcaaataatatgctcatgtttttcttcaaccttcacacaccatttcaggaagtatctctacatttaaagcgagtccagttgttaatgtaaaaaaggtacaagaggccagggcacagtggctcaagcctataatcccagcactttgagaggctaaggcaggcggatgacctgaagtcaggagtttgagacaagcctggccaacatggcaaaatcctgtctctactaaaaatacaaaaattagccgggtgtggtgacgtgtgcctgtaatcccagctactcaggaggctgaggcaggaaaatcgcttgaacccgggaggtggaggttgcagtgggctgagatcatgccactgcactccagcctgggtgacagagcaagacttcatctcaaaaaaaaaaaaaaaaaaaaaagagttgtaaggaaaaagccagagaaagtagtgtatttcttgaacctttaaaaaaaattaacaattggacccatttctttacatttagaggtacttcacctgaaaacatatctaaaggttacagaaaaacatattgactgtattatttgaaaatgtaactaatattctgtttaacaataaattctccccatgattttttttttttttaaatttttgagacacagtttcactctgtcaccaaggctggagtgcagtggcttgatctcggctcaccgcaacctccccctcccagcttcaagcaattcttgtgcctcaacctcccgagtagctgggataacaggcgcacgccacaatgctcagctaacagatttttttttttttgtatttttagtagagacggggtttcaccatgttggccaggctggtctcgaactcctggcctcaagtgatccgcctgcctcagcctcccaaagtgctgggatttacaggcgtgagccattgctcccaatttctccatgattcttgacttttaggtcactccatagaacagaaacagatgcccattgtgaaggttcagtgagccaagattgcaccactgcactccagcctggacaagagagcaagaccctgtctcaaaaaaaaaaaaaaaaaaaaaaaaaagaaagaaagaaagaaagaaaaaaacagatgcccatcaaaaggaaatgcattttgctgaaagtagcgcagttttcccagggaaataacatttgagccgagccttgaaagatgagtaaaagttcgtcaagctgaaaaatttcatcgtaagatgagtcgaacacagggtcattgtgagccgttggctggcccccgcagaaacctggcagcccctttcaggtgaacctccagtccattctttattcaggcaccagtaggatgctgtgctgggtggcattcctgccccagcaggggctaggcctgagtcacatgcagggcaggggcctggtcacagcctggggcctcacctgagaaagacctgtgagaaaacattccaatcccactcattcctgcccacaccagggctaggcacgtggggacagcagggacggtgaagagcatgtttgggaatgtgatgttctgtggtggcttgttaggaaatcataagtagctttctcctgatgaccagcttgaacactggatcgctgagcagggcacaggtggaaggaatcagaaattactgtattaacaccagtattttggaggcacagaaacaaggggtgaagcaacttccctaaggtcacgcactttaggtgatagcactggtgtaggctcccataaaaatgttctttcaggtctcttcgaactcataggttcttgaaaatgtgaggggcgaaattccttcattttatggcattaatgaccactaatcaatcaatctttctctcaattatctgagcaattatgtaattactgagtcctagtgatgcctacaactgggcttcctacagtcctgcagtggtagaaacaaaggaactagaaatcacggtgtttaccttggagcaacctacaatctagttgcataggaaagaacccatttgacacaatgagagtaacaaaaacaacgaatgcagttgacattggaatgggctggagctttgggagaaggaatccttaggggaagatgaaagctaagaaaggcttggagaccatcaatggagaggaagggaaaggacagtatctggatggagagctctgggcaatatttaggaagactcaagagcgcctgctcatgaacagatggacagacaagcgtgtgctccctcctgaactcacagacttactggctcacctcacagcagggctccccttccaggctttgcaggtgatatggttccttctccatccaggataactccagtgaaggatggacagaggcaagattctagctccattttggctgcaatgcgtccttgttcttttctcctttgctggtcattctggtctgtttgggaattggactcgttgtctctggtcaactaacctctaaccctgccagggggactaagcatgctacagagcgcccaggtcccccacctcccacttccatatagccctgagcaaaccacttagtgtcagtctctaaatggcccagagcagcttgtggctccattccaggagcaaaagcactgctgagaatgtgcggatgcagcctgagacccccaccatgccagctcctagcgctaaagcaggctggtacctcacactgctttcagaatcttctaagacactgtgggtgtgaggtcttccaggcaggcatcagcacccaccaagccggtcctcagaaaacgactggaggtagagaaagcagggctggaaagagacaaagaaattccaggactgtcctcactagcatattctaaacgaagcagatcttcaggcagccgtgttaggtatgatgtccccgagagagtacacattaacatgacaaagtttgaggaatgaacataagatggccatgcaatgtcaaagtcatggctcacttgggtgcttctctgacagaagagatagagtgtggcaccagtagtccctgttgggttctgtgtctacaacagagagctttggggctgccctccctcacagagcaggctttctgcaaatgctcaggtagggctggatatattcgtagaatcttccagacccatccaacccagaaggtggtggtccccgaagagtggtggtgtacatgagaagctgggggaacgtgttacaaggcagacccctgggccggccttcagagagtctcattcacctgctctggaaacactgctaaggacttggcctctgctgtgagccaagaggaggaaagaaacccctctcactctagaactacctttttctgcctcaaccaccttttttcctgtcttttaaaaatttccaaaattctctgcatctgtagtttttgttaagtactttgtcatgccacctggttagctcaagccagagacaatcaggaaaaagctctatcagtggctgtcaactcagccacttccctccgtaccgtggtccctcattcctgcagctgggtgggagccagcacagccccaggcacaggcagtgccggcatgtattctcggagctccacacaggaatgtcccactctagaagggaagataaaatttagcgctctccatgcactgggtatgtgtgccaggaaagccctgaaacttttgctcacagggctcaaaatgaaagcagctgttgattccgagagtggcaggtttgacgacatttggagtccccctatgtgagaacggagagacccctggcgcttcctccctgctatctgaggaagggggagggggcggggggtgggaaggcccagcctctcagggttgcgtctctccggggcttcccaaggaggcagcgccggccctcccagtcttgccactgtcgccgtgctcgtgtgccgggccagccggagccaggcccgatcctggccactgtgcccaccaccgaaggcaggccccaggccgggtccctctccttgcctgtctgggggaccctggtgtcgggctcctttgatatctaaaaaccagaccctcggcccccagcgccggagcccggcgcagatccacgccctggtctctcagcgcgggggcctgggggcgggtgcggttcggggacaagagaccgcaagtgggggcgggcggcagcgtgtgagcagctcagatgggagatcacgcgcgataacccgggccctggatggcagcgctcgacaggaaacctcgagcgaggagccagctgggggccggcggggcggggctgctgctcccgtaaccgcacgggagccgcggctggcggcaacacggggctgggagcccaccttggctgcatggtgaggaagggccggaggttccttcccaggcccagcctcctctctgtcttgcggagggcgtccttcacgggtgtggtttgtgactttgggacggcggtcccggccgcctgggctttgggcgtagtgggagagctgcccagcccgcagtgcacccggcgtagctttgacccgggagggacccggccccaagccggacgcggggaggccagggcggagaggcggcgtgagcgcggcttagcaggctgaagctcgtctctttaaaatcccagcgaaatattcacctatagcgtatcggtgacggttttaaaatccaagtggcatttcctctcccagcctccgaaaaactcggtgcagtgggcagcggctcggcggggcgtccccctgtgccttgcgtccgggcgggcggcccgcagcgggaggagcccaggcgcgggcaccgaggggcggaggcctggccccggctcggggagctccgggaggagcttgggcttgggctagccgatggatgcacgggtttcttccggggaagctgcgggggccacagggactctgaggaggcgccctcaacagcctgggaccggcaggacggatcccagagcgagggcgaccagcgagcgaggcaggtgcggccctcctggctccccctccgcccctgtcctcccttgcgttgcccaggcagcctgagctcccaaggcccagagggtctccagcttacagttgcagtgggactgattcggtggatcggaaaagcgctttcatctcactcggctgctggtgaaagcatctcgtccttacagcactggataataataacaatagtgatcatgctatttaccagcagtagttggttttctgtgttcatatataaatgtaaccatattcaccaaataccattatcgtgaaagttctgtatagctgaggtccttccaaaccccggcaagtcatcaccagaaatgtactgagccagggctgggcgcaaagcgcttcgctaaatgggccagcccctgttcctccactttctgccctgccagaatcttgccgcacacaccttctttgatgtaagggttcatgttatttgtttttgttttggttgtttagtattataaatattatatactatcatagttagagttccaaacaccacaaaaaggtgtaaggtggaaaataagtgaaattcacccagcctccccctcccgtggctcctctgcagaagtaaccgtggatgacatttttgtgtgtgcggccctccagatatacatatatttttaacgtgttttttcttgtaaaataatataacattactattttcatttttaagtgtaattcagtgacatgaagtaagtacatttacattattgtacaatcatcagcactatccatttccagaacattttcaccatcccaaacagaaactccatctagatatatttttatgtatatatacatatatatgcagcttacatagtgtttttttcatacacaagtatctagagctttttttgtttttgtttttgtttttgaggcagggtctaactctgttgcccaggatggagggtagtggcatgatcacagctcacagcagcctccacctcttgggctcaggtgatcctccgacctaagcctccggaggagggggctggggctacaggtgtgtgccaccacacccagctaattttgttattgtcattatttgcagagacgggtcttgctatgtctcaaactcctgagctcgagaaatcctccagcttcagcctcccaaagtgctaggattacaggcatgagccactgcacctggccaccttttttaaaacctaattatcttgaagatctttcatggtagcacatgtagaattatctgttgtgttttttttaacggttatatatgaatacaccaaaatttatcaggttcctagttgatggacatttacattattttctctgtatactgtgagagtttatcctcagaaaaaattaaattctcagagaaatggcaaaatactgcctggaattttgacataaggggtttgctcgaaagtagatttttttgaaatggtgctaattttcaagagcaaaacttgagggcagtgtgctgcgtgagaaagaacaaaggcccggcaagacctggcttctcgtccaggctctgacacatgagctgtttgactgcgggagagtcacttcacctccctgaccttcagtctctttatctgcaaagtggagcaaataagatctacccggcttacctcactcaattgttgttaggatcaaatgaaataaaaaatataaaagggttttgtaaactgaaagtgtagagcaaatgtttggtatgacaatgattgttacagcatcagtccctggagtcagccagagaaagctacatgtccaagttggcaacaagaggtaagaataagtgtctttctctctgtatatctataatatatatatataatatatatctataatatatatatatgcacacacacacacatacacacacatattgctctctatgtatatatgtacatgcatacatatatgtttgtattgttctatttatgtgtgtgtatatacacatatgtatgcaagtgtgtgtgtgtatcttacactctatgtgcctggcatatagcaagtgttgtctgctaacctgagagacttgtccactggccttggggggctcttggtggaatgagcggagggaactgaaacatgcaacctgctcaccaaaggagatcacttgcctgtcattgtttactcccagagcgtgactgcaggcatcgtccctccctcatgtttccttagcaccctgtgcccctctctcgtgggatgatttgtttccttgcccacctctctgctcggctgggaggctacatctgtgtctgtcacctccaccctcactgcccagcacagtgcgtgacattttctcctagtaaggatggccaccacatgaccactcgtgaggcgccactccttggcttgtaggtggccatctctccctgtgtctttacatcatcttcacggcatcttccctctgtacatgtctgtgtcctaatctcatcttttttttttttttttttgatagagtcttgctccctcgcccaggctggagtgcagtggcacaatctcggctcactgcagcctccgcctcccgggttcaagggattctcctgcctcagcctcctgaagcctcatggtgtaccaccatgcccagctaattttttgtattttattagagatggtttttgttttgttttgttttgtttgagatggagtttcgctcttgttgcccaggctggagtgcaatggcgtgatctcggctcactgcaacctctgcctcccaagttcaagcaattctcctgccttagccttctgagtagctgggtttacaagtgcctaccaccacacctggctaatttttctgtattttcggtagagacggggtttagccatgttggccaggctagtctcaaactcctggcctcaggtgatccacccgcctccacctcccaaagtgctgggaatacaggcatgagccaccgcacccggccgagttggggttttaccatgttggtcaggctggtctcaaactcctgacctcaggttatctacccacctcagcctcccaaagtgctgggattacaggcgtgagccacctcgcccgacctaatcttgtcttcttacaaggacacgagtcatattggatcagggcccccactaatgacctcattttaacttagtgacctctttcaagaccttttcttcaagtacggtcacattctgaggtgttgggagttaggatttcaacataagaatttcagggggcaaaattcagcccataacagaaatggaggcttagggattattagtgttaatggatgaggaaggagcaaaagagtgaatgggtttcaccctttcaggacaaacaaccactttctgggtggtttatggggcaagagtaggaagagcttggttttgaggaccaggggaagaagagatgacaatgactatgtttggctgaatgcagacaggtaatggaggctggcagtatagcctggattttagggctgatttgaagcctgtcctggggcttgccggggcatctccagttagcccaggggcccaaggcaactgtgaaccttgccttgttccagttggctttaattttttctttgaaatgttattaccatattttaaataaaaacataatgtgtccttgtcaaaagagaaaaccctgcagctgttccccatctcattcagagtaaaagccactggccaaggaagttctacctaacaaccccacccgcttgtcgccctctttcctagtctcctagaacttcccctcattcatgctacctacccctgcttgcagttcagagacactgggcacaggtccaccacacagcctttccacctctgctcctctgcccggagtgcccttccccgacagatctgcacagctgaagcccgctctgaccacctgtgaaaaacaggagacatctctttgtcacttcatactttcatttccttggctagcactgagactgtcttttcttttcttttctttttttttttttttgagacagatgcttgctctgtcaccaggtgggattgcagtggctcgatctcagctcactgcaacctgtgcctcctgggttcaagcgattctcctccctcagcctcccgagtagctgggactacaggcacatgccaccatgcctgactaatttttgtatttttagtagagatggggttttaccatattggctagactggtctcgagctcctgacctagtgatctgcctgcctcggccttccaaagtgctgggattggcatgagccactgctcccagtatgtctttttatatgtttgtaagtaatctgtttttctgtctctgcgaattgcctatttatatcttttgctgatttatctcttggactattagtcttagctttcatttttcaaagtattattatttattcacttatttttttttgagacagggtctcactctgtcaaccaggctggagtgcagtgacacggtcagggctcactgcagttttgacctcctgggctcaagtgatcctcgcacctcagcctcctgagtagctgtgactaaggcatgcaccatcatgcccagctaattttttattttttgtagagggagggtcttgccatgttgcccaggctggtctctaactcctgggctcaagcagtcctgctagcttggcctcgccaagtgttgggattacaggcctgagccaccgcacctggcccatttttcaagctattattgatggaattccaatcctgtaaaaagctttaggaatgaagctgttcatcttagaattatttataatggtgaaaaattggaaacaaatgagcaccaatggggaatggttatgtagatagtggaaagcttattaggcaacctttaaaaaggatatttattaatagtaaaatgacaaagtaacatgaaatatgaatatatgaaataacatgaagtcttagattataacataatactaaatgaaaaaaacaattcttcaggaaatttttttttttttgagacagagtctcactttgtcacccaggctgacatgcaatgacgcaatcttggctcactgcagcctccacgtcccaagttcaagtgattctcctgcctcagcctcccaagtagctgggattataggcacgtgccaccatgcccggctaattttcatacttttagtagagagagggtttcaccatgttggccaggctggtctcaaactcctgacctcaggcgatctgcccacctcggcctcccaacgtactgggattacaggcgtgagccactgcacctgcccgtggaaagttgttatgtaaaatgattacagtttataaataacaaagactttggtcagccatctgccatcatattaataatggctgtgtttgaaagtggtattatgggcaattctgattttttcctacttttctgcacttttatattaagttgatttacttgaaaatgaaaagaaaaatgatcacaaaggctgggctcggtggctcacacctgtaatcccagcactttgggaggctgaggcgggtggattacctgaggtcaggagtttgagaacagcctggccaacatggtgaaaccccgtctctgctaaaaatacaaaaaattagccaggtgtggtggcaggtgcctgtaatcatggctgcctgggaggctgaggcaggagaatcgcttgaacctgggaggcggaggttgcagtcagccaagatcatgccactgcactccagcctgggcaacaaagcgagactctgtctcaaaaaaaaaaaaaaaaaaaaagaaaagaaaaatgatcacaaagtatcgctcaaaacataacaactttaatggaaataaaaatacaagaagagaaacatttgctcataaagcactacccctaagaaatcatacagccctgttcttccctcttcccttggaacccttatctatgggaatacataatttgtaggtagttttgaacaaatgatccaattttacaatgaaacatgaatatttgaaatctgacactgaggagagaattaaggaggctgtggtactttttaaaaaaatttttgtttatttatttttttagacagagtctcactctatggcccaggctggagtgcagtggtgctatctcaactcactgcaacctccacctcctgggttcaagcgattcttttgcctcagcgtcttgagtagctggtattacaggcgcccgccaccacacctagctaattttttgtatttttagtagagatgtggtttcaccctgttggccaggctggtagcaaattaaagagagtagtaaaacattatatgttgccagtaaattagctggagtcgttctgcagttcagggtgattgaggtatctccagtgggtcattgctataagcactgggcagtgtgagtcctggcctcacatttggtagcaggccttctgtatctgtcaaccccccaggccggcctctcagccctcaatgaaagaaagctaattgtagagtcaagaatatgacctgctataatggttcgatcctgggagaagggactccacagcctggtgaggacccctctcaccacctctgaggatcagcaagtctttgaaggtcagtaccaagtggtggttaagacctggactgtggatccagatgtgcctggattcaaccctggctgtagacattaggcatgttattaacttctctgagcctcagtttccctagctgtgaaatcagagtcactgtgaagactgaatgagaaaactcacacgtgtggttcctggcccagaacaaatcttcaaccagtggttataactattactctgtgtgtctagcctatatcttttctgctgcagtgaaagttagttattcgatgaaagggagcaacccactgagggggatggtctgggtgcctggatgctgtggtcaatgggtcggcatcacacccagcaccctgcccaacacagacaccgcccccacccccccacccatagctgctgccactgccttcctaagaacagtgacttcctgttttctaagtttttaccctgcaatgtcatcaccagttgtgcctgagcctgggggtggagctggcagcagcaggactcagggctcaaagttggggactcaaaggaaggaaggttggcgagtagaaagctggccactcctacctggatcatgagctactgtgattcatattgattccatcagtgcctacaaactgagcgcttaccaggtaccaagcccttcccatttgagtgtcacacaccctgggaggtcgctgtgattactcagtgattacacagtagcaacaccaggacttggattgcagttgtcgccttcgtaggattcattcttacctgccgtgcttcctatcaaagtggaaacaagctggacgggggtgaggtttgaaaggctgccctatagaaattggaggatctgtgtgatttgtgcttctgaaggcagaactaggttcaaagttttttttttaactctgaaaattagagctctccaccagtgattgctgggtgctgagcttcctgtcaccagagatattcaagcagaggccagaagtgcctaccaaagaagaaactcctgaaagaggtgggaagctctctatatgacaggaaccccagaggcactgggataaggtagattgagaagggactttgcatcagatgcactcagaaaatctctagccatgtgacctattggagccgcaacgtcattatctgcaaaatagaattggtaataattctgcccgtattgtgcaaggttgttctgaggattaagccagatcatgcaagtgcaaagagctctctaaactgtatgcttcatgcatgtgttacatcattatcattttgtgaagtgaggagttctcagaaagtctacacactactgagctcccactgtgtgccaggcactttgtacacacccattatctctttttattttttttgagacggagtcccactctgttgtccaggctggagtgtagtggcgtaatctccgcttactgcaagctccacctcctgggttcacaccattctcctgcctcagcctcctgagcagctgggaccacaggtgcctgccaccacgcccggctaatttttttgtattttttagtagagacggggtttcaccatgttagccaggatggtctcgatctcctgacctcatgatccgcccgcctcggcctcccaaagtgctgggattataggcgtgagccaccgcgcctggcccccattatctgtttttatcttcaaacacccctgaagagtgggtatccccatcctgggctgggaaacctggccaggttctgtccccaaccgtggcatgatggggtgggaggtcagagggccatcccctgctgtcactccttgtacctgcagagcctcttagcatgcgccactgtgcagggcaccccacaaactttacctcatttctctgcacccgtgaaatcggtcttgtcaaagcccttctgcagataggagaattgacgctcagagaggttaagaaaactgttccaaaacaagccaataatggggcagattccacatttgagtcttagagtctttctgactcaaagacttattatgttctttgctcttctctaagcctgtgatgtgcgggtgaggagggaaaggtgcaaatgaaactataaggcaccatctgtgcttgccagagccagtggtggggggcggacttgaagtgaaacgtttacaagccgttgtgactaagtgtcaaaagtgggcaaaatggcaagggctgtgaaatcagaggtaggtggaaactccggatcctgagcccataggtcaggtgcatcgaagccataaggctaagagaagtacctggagtcaggagacccaggaattcccttccagctttgccactaacctgcaggtgtccttggtgaagttgcttcattcctctgatctcagtttatccacctgtgaattgggcccaaaagtagccccctgtttgtctcctggcactcataagaatctaactccatcagacacaggaagtcactttaaaagtagaaattagagttcaaatgagaagaatccttattagttggatgtgagtaagtcccgcagatgcccagctccgaaacaggatttgctggagaaggaggttgactgcaggggaaagggcaccagcgtgtattttcagcctcagggtatggcaggaccaggttgattaaggcctgatccctgttagcagaagttcatagtctggctcagagacagacagacaaacaacgcaattcaagtaaatctcacccagagaaaccagattctgtaaggataggtgcgtctcccccagggtgcactctggggctccagaatcttcctgttagtggtcagtaccatgagacttcctgaattcagggcttttttttaatgaagatgacaaaaggctacaaagggatggcgaggctcactgtcactaattagactcacaacacttagatacaatgacccgtatgcctagatactctgtgatcatctttggctgcccccagcctcctctgagcatctcacatggcctattcctgggatcttgctacagggcaggaaggttccaacttatcgtgcatgggcttaaagtagaaatcatggcagtaacaataggtggcaaaatggaacacatacccttatggggtccttcaccccataagaattattttattttatcctcaccccataagaagtatcatatttggccaggcacggtggctcatgcctgtaatccgagcactttgggaggccgaggcgggcagatcacttgaggtcaggagtttgagaccagcctgaccaacatggcaaaaccccatctctactaaaattacaaaaattagcagggcatcgtggtgtgcacctgtaatcccagccacttgggaggctgaggcaggagaatcacttgaacctgggaggcagaggttgcagtgagctgaggtcatgccattgcactccagcctgggcaacagagtgagactccacttaaaaaaaaaaaaaagtatcgtatttaaccctcaccaccatctaatgagacaggtagtgttgttatccccattttacagatgagaaaacgaaggcttagagaagttccataatacacagttcagaagtacagtgtataagaaggaccaaagctttaattttattgcatctgtttgacagaaatttacatttgttgtagggtatggctgcatctctacagaaggcagggcttccctctcacatgctgtggcccctgtaatgatgcaggtctgaatctcaatccattcatggccatgcagtgaagtccccatgcccaggttccactccaggccacttaagtcagagcctcaggggagagggcggtggattgagagtctgtgtgagaatgctctattagtctctggggctcctttcagatgctgaggttctcctgggtgctgtaatcttgggtagggatcaggaacattaaataaaacagcttctccacttttacagaaaagtagctaccatgtaataccctgaaacctcctaggaagcagctgctggtccctttgggatggaattggtagaaatacgaagaagccacaggagcgcgcacagggaagaagccaggaccaagtagagagtggcgatgcggtgcctttgagctggcatcctgcaaaactgtctgttgtccagggaagctcctacaccttgtgtgcggcctcaagagctaagacttaagccccatgagggcagggactcagaagactcgacccaaatatcagacatcattgtcttttgattctcatcacaacccttaaggtagatatgattaccctccatttaatagatgaggtaactgaggcccagagagggaagtgacttgtccaaaaccacacagctagtaagtggcaagagaagtactcgaacccacctgcacgcaatccagagttcattccatttcaatagttcccggcacagagcagatgcccaatgaatatttaattaattgcgtaactgaatcaggtcctgcatccctgcatggagctttctgggccatgactgtcttcctcaggcccatctctcccagcacaggcatagtgggaccgaggagaggagggtcctacacagggaattatgttggggttaatatcctctcctccacccaaccacacacagcacacttgtcatcagtcataaaactatgcagaaagaaaggaagaaggaaggagggaaggaagaaaggaaggaaacttgttcatattatttatctcagggacatgcccaatccccctgcccctttgtgttgtgctgagtctgcacaacacaaagaaatatttcttatttgtgctaaatttactgtccagtaatttttctgttctcattttctgtgacaagcagctgagtgattttctcctggattttcttctgagtctcaaccagtcccataaatcgccacggttatctcctctgcagtcctcacagcaaaaagtcaccccagctttggtggccttcatgggggctggcttgtcccccagaggcctttagatcgtccctaggtcagtgaggacttccagcaataccttggggccagagggcaggcacacctggggctgggcccagcatcttcctcatcactgaagttcagccctgaaaaattccatgatatcgagtgattgtctaccctgtgccctgcactctgatgctggggctggaggaagaggcaataatgaagatgcagccattggtctcaggtgctgacagcctagatggaggggcatctgagtcctgaggagttgggtttgtagagcgctttgggggatataggctcttgaaccgacatcctctcactttttcctcaggggctcaggtggtgggacagtctgatttcaacaggtgttgagtggaggggtagaacgcaagcctagaaaaagatctagctcagcaggccagggggtagaaaaatatgggtgttcaaggaagaatggggggaaaagacaagagcagagggacagggtggcacaaagctgtggtcttttcaggcctggactggttatggcagagccctaacatggctggacaaagagcttggactctcgtccgagtggctgggtcatcaatggtctctgggcagggtctgtgggaggtttgtagagatcagctgcctgggggcaagaggggtcctgaattagggttggagtcaaaagccaggggacagagggattcagggtggtgggggtggggacactggcggctgcctttgaatcatctgcttccatagttcgtcagggaggccaaaacgttgctggcatggaggggtaggcagggctggcccaggggcaggaagggggcgagaactgctagggatcagtcctgggctgcctgtgaccgtgtgctctgaacccgaatactcggtgcctcagtgtccgagtgtgggtggcaggaggatctgacgatgattacatttaaggcagtgtctgaagaaatgttagttttcaccctgttcaacagaagaggcagctgacagagcatacataacctgccccaaatcacacagccagaaagaatgacagcactcccacatatggcctccactccctctgccctcatctgggtccaaaggccaccagagggcgcccaggccttgggagacagacactagcggggctggcctgggacctctgctctagttaccaggcaggggtggagtgagatgggtaccacaccctgttttacaggttgagttgctgcacgtttacctagtaggaagtatggtcagactaaaatctgagtctcctcattcacagtgcaatgatgttccaaataaaaacactaactttttaaatttttttttgagacggagcctcactctgtgtgccaggctgaagtgcagtggcgtgatctcggctcactgcaacctctgcctcccaggttccagcgattctcctgcctcagcctccagagtggctgtgatcaaagctgccagccaccacgcccagctaattttcgtatttttagtagagatggggtttcaccacgttggccaggctggacttgaactcctgacctcaagtgatacacccatgtcagcctcccaaagtgctgggattacaggcgtgagccaccgcccccagcccaaaaatgcaaacttttatttaaccagagtatttagtgtatctgcattcttcagcccattgtactccaatggcagtgccaactaaacgtgcattaactacagcttgacaaaggttaatatggcactaggagttaggggcccctgggaaatttgcagtgggagaagctaacacagaagggatctttgagctgcattttgtaggatgcatcaaatgttaccaaatagtagggtttcagggagagaaatggagggaacatgaagagggaacagagagtgcaaggcacagggcaaatagtctggaagagcaaggcgtgtcctgggaatggggtgtgtgtagtgggaggaggggagacagagaaggctgaggccatggagctgggactaggggacagggagatgctgggcctaggtggggaggggcaccaaaggtacctctgtctgttggccatgaaacccttcagggaacagggaagggaagccgagcaccagatcccactgtcctaggcgggagagtgcttggcactgaggaggcagggagttgggggagagttaacccagattctctctgtcctagttaactgtcagatattgaaatgatctcatttgaccatcatttgacctattgtctccctgtgggtaggcctcagagccacacacctcaggccaggagtaccattcatccagacgtgaacatcttcccgaggcttccagagttcttggttcacaccggggctaacatggctgggcttctgctgcagtggcaggagctctgtgcacagagaacagcctcatctgctcgccttgtttccacctcccctcccattgccccaggttctttggccccacagcggccacatctgccgttggtgccaataggttttccaggagctggttgaggtgggagggagggagagggttgtgatcaggctgaggcatggggattggatatagtctccgtgtcatgatttatttggtcagtcagtcctagtgccaccctggggtaatggggatgtgttctcgtcaccttgggcctggctgaccagctttatctcttggcacagaggcacagagctttggcctgctggatcccaaactctgctacctgctggatggaatcctcttcatctatggtgtcattctcactgccttgttcctgagagtgaaggtgggtaccactgggctttgggaggagggcacggggtcccccacttgatggatgttcagaggggccttggtcttggaaggtctcaagctcgggtggtgcctggggcttggtatccaggagcaaagcaaggaccagccaagtgtgtgccttgagtgggctgaggaggaggtggcagtgtctggctgagatggacagggtaggagggagagcctggtgctaggcacctccatgacaagccgtacaaatgtgtgcacatcagagtgtcccagggaaggcgatgctactggtgacaaaggggcttacactcaggcagaggtccttctttccaagtgtgaatgaaggccatgttagcctttctcttgaaaaggccctttcctcatctgtaactggggagctgaccagagcgtgggtttttcacttggtgccttgcagaccctggatttcttcgtggggctggtcatggtgtgggcagagattggaagaatttaggagtaaaggggagaatccagtcccagtcatcacttcagtgcttctcaacccatttcttgtttgaattttggactttggcataatattttatttgaaaaaccaaatcttactgagtttcttgttttaagtttgaaaatgctgccctagatgatttctaaggttgtttccaatgctctagatctgtaagacattgcagtttctcccgcctgaagcggcatgaagtgaagcaggagtgaggctgtgtcagcttcccacagatgctcaggacactaagcgaacgcgaggcttcctgggcaccggggcagccgggcgatggctgagggctgggcgagtgatgcacgtacagtacactgctccgggggtcaagataggaggcgggatcttgaccagccgccatccaccctggattgtcctcagagtccccggaggaagggatcctagagaatactcatgtccccgggggcgcagaccaagaaccttatacctctgcgcacgcgcgagggcgctagcccgggaagaataaactccagcgggtcctgggccagcgtgatgaatgcacgtgtcacaggcgggaggaaaaaggacaactgggctcagaaaaaggggctgccacgccccggcccctgcaagggctcagccccaggaggcagggcagcattgttagttgccaaggagcggagtagggctgtccctcgggtcgccgcgcgccctggcaccccggctcccctgcgcgccctcgcggagcagtaacgcgctttgctttctgtgttgcagttcagcaggagcgcagacgcccccgcgtaccagcagggccagaaccagctctataacgtaagtcagcctcgccgtagaccctccggaaaggaagggcagcctcctcctcggacctagggaacgcgcccgccagagtcttgggtttaggtttggtccctagctatcacctctgcgacccggctgcaacttgtttaacctcagttttctaacccacaaaacaggtgtagtaattgtacctgtctcaaagggcgccataaagattacatgctttaatgtcttgatgcatggaacgagcttagtctagtgcctgccactagtgagcccccaagccatcagcaatttgcaaaggctagaggggggtggagaaggaatgtattagaatcttcccagaggaggggaaagcgatttcacactccctgtgcaatgggactgtggtgaaattgactaccacctctgagcccccacttctctatttgctcatgagaatgttgatccttatcccgttggactgatcagcctatagtacttggtgacctttggggatcccatccactgtcatgttaaggcgtgttctctgagatgtcctctgggatgatggtctccagatggaccagttaccatcccctccccagcccctgcccctctttttatgagccaccccagagagggaaaccacactccccagtccagctggctccatccttctgaggttcctccgtcctgtgtctgacactttcttatctgttataggagctcaatctaggacgaagagaggagtacgatgttttggacaagagacgtggccgggaccctgagatggggggaaagccggtaggggttcctctaccttcctgtgtgttcctgcatgtgtggtggggctcagcccaggctgtgggggagggctcctcagctcactctgcaaccagactcgaccctcacatgtgtgggcccgggacaagagaagagatggagacccacttgctgccgcaccctcttccttcctccttggctccattctgcatctcaaggggcctcacccccggacgtggcaccccactgctcatgtctaagctctacccacttcccctcaaactgctccttggccatcctgagatgcacacacggtgacgccatctgccccaagaggacagacctggtgaagaggtccatacaggaagggcccaagacccctggataacccacatatggtcggggtatggtccctggggggtttgacctcttggctttgtagacactatacctgtgggtatacctgtgggtaggggagcagctggatgacaccacagtagggtagggtcctctttgttttttccccttcattctgatttccttccttccttccttccttccttccttcctctgtctttatttattttatattgacaaattatagttctacatatttatggggtacaaagtattgttatgatttttgaatataatatgaaatgattaaattaagctaattaacatatttatcacttcaaatctttaacttttttgtgatgagaacattagcaacttactcttagagatattaaaatgtatagtactcacatattaactatattcagcatgttgtgctgttgatctaaaaataaattactcttcctatctaattgaggctttgtaccctgtgactatcatctccccattccccccattccccagcctctggtaaacatcatgctacctgtccatgcttcagtgagttaaactgttttagattccacatataggtgagaacatggagtgtttgtctttctgtgcctggctgatttcacttggcataatggtctctagttccatccatgttagagtgaataacagaatttcttcctttttaaaagctgaatagtattctattgtgtgtatgttccacagtctctttatctgttcattctttgatggacacttaggttgattccataacttggttattggtttcttttgttttgttttcttttttttttttgagacagcgtttagcttttgttgcccaggctggggtgcaacggcacagtctcggctcaccacaacctctgcctctagggttcaagcaattctcctgcctcagcctcccgagtagctgggattacaggcatgcgccaccacgcttggctaattttgtagtttttttagtagagacggggtttctccatgttgatcaggctggtctcgaactttcgacctcaagtgatctgcccgcctcagccaaccaaagtgctgcgattccaggcgtgagccaccacacccagccttggttattgttaataggactacaatctggaatcacaggtgtaagcccccgcgcccagccgtggttattgttaatagtgctacaatcaacatgggagtatagacatttcttcaacaagcagacttcaaatcttttgggtaaatacccagaagcgggattgttgggtcatatggtagttctatttttagttttttgtggagcctcaatactgttttccataatggttgtattaatttacattcccaccaagagtgttcaagggtttccttttctctccatccttgccaactattgttgtcttttgtctttttggtaatgcgcaccctaacaagtgtgaggtgatctcattgtggttttactttttatctccctaatggttagtgatgttaagcattttttcatatgtctcttagccatttatatgtcttcttttgagaaatatctattcatctatgatttattatggaagttttacagtttcaggccttatgtttaagtctttaatccattttcagttgatttttgtatacggtgtgagataaggtccaatttcattattttgcttgtggatatccaggttttccaacaccgtttattgaagagaccattcatttcccattgtatattcttggcaccttttgctaattgctcggctgggacctatgttactatgttgaatagaagtagtgagtgtgggcatctttgtcttgtttcagatcttagaagaaagggaggaaaggcttcagcttttccctgctgagtgtggtgttagctgtggattggtcatatgtggcctttattgtgtggaggcacattccttctatacctaatttgttgagagtttttagcatgaaaggatgttaaattttgtcaaatgcttttcctgcatctagtgagatgatcatgatttttgttcttcattctgttaatgtggtgtatcatgtttattgatttcgtttgttgaaccatccttgcatcccagggattaatcccacttgatcacactgaatgatccttttaatgtgttgttaaatttgacttgttagggtccttttaagcacagggctcaggacaaaggccagggctgtcctggtgtaagggcagtgctgccagatgctgccagtggtcacgcctgtccatccagcccctgtccaggctgatccctgtgctggttgtgttgttgctagagtgaatgggcagtagagaggctgtcgatttcattgaccactcctcacccccaccatccaagtttatcttgcctcctctcctcttgtcaggactaggagggtgtggggagggcacctttcagtaggcactcactaccagtggctggccctgctccaaatgatggtatgtgactccttttgtcttcagccaaaagtcccacttgtcagcttgtgatgtgtgtgggcgtcccgatggcctgccctgggcaatgctgggcttgggtgggcccctctggaagagcgaagtgtgtatccagttgcaggtaaccaagtatgagccatgtagtgccatgagggccccaacagtggcctaggcaaggctggggtagcacagggaggagagaggcagacggcagagccccaggaaactgcagtcagggggcaggatggggtttgctgtactttcatggcttgggtttgtgtttctctccctctaacgtcttcccgttgtctttcctagcagagaaggaagaaccctcaggaaggcctgtacaatgtgagtagaggagacctcacatttgaccttggaaagttggaggaagggctggaggagggctccagaggaagggctggaggaagggctggaggagggctccagaggaagggctggaggaagggctggaggagggctccggaggaagggctggaggaagggctggaggagggctccggaggaagggctggaggaagggctggaggagggctccggaggaagggctggaggaagggctggaggagggctccggaggaagggctggaggaagggctggaggagggctccggaggaagggctggaggagggctccggaggaagggctggaggaagggctggaggagggctccagaggaaggcggttgctcctcactctgtggtctttgtctgtccagaccttcccttcttggattgagtaatgtctcacctgcttgcggcctgcagcagcacctgcttctagaaagtctccttagctgaaaagtgccgagtaatctcccttccctccccaaaccctgctgctggagttcccaggttgatcagcctggggtgtagggggacacagcaaggtcaagctaggcaaggacgaggtggctggccccttcgaggggctcctgtcctgggtgctgaagtcttctgagtgtcccccgctataggaaggtcaacctcaccctcctgggtgtgaccctgaaccctgattgtcgatctgggttgccatgcaggagacccttgcaggtggcagccttctgtgaaggagatgcctccccgcccctcctgtggggagggagggttgatctacagcccgtttggctgtgtaaagagacaacttgctcagataaatgattctggggctccaggtgagcccttgctttgcccagtctccgtgtctttgtctagaactccacctcctatctttttgagcctaacttgagcccctcagctcagtgcaaagagctggcagctcggaggagactccaaagggctgaggacgaggggggtgggctggagctggttgtgggcagagaagtttgtgtgcataaggtttggagccttgattgtgggagccctccctgtctgccactgctgccaacttggggatcaagaagcttcctgttgtaggggaacctgctgctttctgcattagttggtaaaaatcagtgttccacgccctcttctgcaggaactgcagaaagataagatggcggaggcctacagtgagattgggatgaaaggcgaggtgagtgttgctgtttcttaatttccgagggagttcctcttggtcctccagacacgcctgctgcaggcctcctttcccatccacttctcatcccagctgcaaatgcccatgtggtggccatcagaggtgaaggcgaacctggctgtcacccagccgggcagaacataagaaactaaggaagggctgatgctctttcagtacagaaaaccacatctagattctatgacagcctaagctttgcaaaagcaggtccgttttaataacaggaagcatcgagtgcttaatatgtgctgccgtgttcagtgctcaggaccacaggtcccaggacaacatgaaaacaattcatcaacaattaagaattgttcatcaacaattaattgttcatcaacaattaagaatttcaaaatggtgagagtgaagcattgaccccttccaagcaggggttctctgtagttttatttaattcccacaacaacccaatgagaaacatgtgccctgcaaggcacaaggaggttgagtgacttacccaaggtcttctagctggtaaacgggcacgtgattgaactgactatgccagagctcgtaactgctcaaaacagctggttgtcagtgagcaaaaatgactagccaagaactttaagagctgaagggaagcccatttatctaagcagtaggcaatataggtcctgcgggccctagaccttaggaatctgatgtctgtgaggatctgagtggggtggagcaaacccaagccccatcatggccaggcctcaccttactctgcagagatgaaggtctgaccaggggcctgaggatccttctctcccaggggcaggggtgctgctgggagacagttacctctgacttcctgggtaccttgggaggggcccttgagcagaaatgccactactgactgcctgactttctaatccttttctcatttcactcccaaacaaccagcgccggaggggcaaggggcacgatggcctttaccaggtaggagctgccggcgtcccttcagtggaaggggcaccacctgacaaggggcaagatcaaggcccccacattttgcctgctggtggcaccagctcttgccaacagctgggcagggcaagcccaaggcacccatttaggccagtggcaacgccactgccaataagtccctggagcacagctgggacttggccattcaagcgaattacttggctccaaccatgccttgcttggccatggcagacagagcagcagctgtccagagggtacgcagcctccccgccgatgcagatggaggcaaaggaccacacaagtgattatcctgcctctttgggttcttgtagaaccctcactctgcatcatttccttaggcctagtaagatgagaggttggctgggaagactgaaggaaaaaaagctaagaaaaatggcagcttcaaaaagaaaatgttatgtagttaggtgcctggtttttgcaaatcagtgcaggcaattatgcaaactaagcacggtcaaactacttctctaaaacatgatccccagcgggttgtcatttccctccttctggctcccatgggctgttcatagctcgttcttctgactctagtgtcaggatgcccagcttgcctgagttgagtgatatcaaaagggccccagaaacttacctgtgtgtggctgctgttgatccttctccttcctggcccccggaccagggggacaggcattccagcaggtttggggccagccttgtgggcctgttcgtgaccaagaaaacactagaatcaccgggcctgggaagggaaggaggctcacagagggctgaggccaaggagcccctcttctccctgtgacaagtccaggcttcctttgggcccaggtgtcagggacagcagattctctggagcaggcctgggccctcccccctgattcctgcccaatatgggaggtgggagactcctttctcttaggtccagcaggaagttggcggggcccaagcactgtaaggcacagcatttgaggagctgagaagaggggtgagaatttagctggaaaggagttgctgcaaggccattcccggcagggcacagcacccatctaccaacgaagctgttgcagccaaggctcctgcccgtggggccagggggattattcctgggcctctggaggctgggtgggtggtcacagggctgtgctgcagagacacctgttggcctctgggttggctcctgcccacacaggctactgacccactctttgttttctgatttgctttcacgccagggtctcagtacagccaccaaggacacctacgacgcccttcacatgcaggccctgccccctcgctaacagccaggggatttcaccactcaaaggccagacctgcagacgcccagattatgagacacaggatgaagcatttacaacccggttcactcttctcagccactgaagtattcccctttatgtacaggatgctttggttatatttagctccaaaccttcacacacagactgttgtccctgcactctttaagggagtgtactcccagggcttacggccctggccttgggccctctggtttgccggtggtgcaggtagacctgtctcctggcggttcctcgttctccctgggaggcgggcgcactgcctctcacagctgagttgttgagtctgttttgtaaagtccccagagaaagcgcagatgctagcacatgccctaatgtctgtatcactctgtgtctgagtggcttcactcctgctgtaaatttggcttctgttgtcaccttcacctcctttcaaggtaactgtactgggccatgttgtgcctccctggtgagagggccgggcagaggggcagatggaaaggagcctaggccaggtgcaaccagggagctgcaggggcatgggaaggtgggcgggcaggggagggtcagccagggcctgcgagggcagcgggagcctccctgcctcaggcctctgtgccgcaccattgaactgtaccatgtgctacaggggccagaagatgaacagactgaccttgatgagctgtgcacaaagtggcataaaaaacatgtggttacacagtgtgaataaagtgctgcggagcaagaggaggccgttgattcacttcacgctttcagcgaatgacaaaatcatctttgtgaaggcctcgcaggaagacccaacacatgggacctataactgcccagcggacagtggcaggacaggaaaaacccgtcaatgtactaggatactgctgcgtcattacagggcacaggccatggatggaaaacgctctctgctctgctttttttctactgttttaatttatactggcatgctaaagccttcctattttgcataataaatgcttcagtgaaaatgcagctttactctaa

SEQ ID NO: 1818 - DNA, 1147 bp, Homo sapiens
gggggagtgcgaatttcttggccctgtcggcaggtgctttctcaaaggccccacagtcctccacttcctggggaggtagctgcagaataaaaccagcagagactccttttctcctaaccgtcccggccaccgctgcctcagcctctgcctcccagcctctttctgagggaaaggacaagatgaagtggaaggcgcttttcaccgcggccatcctgcaggcacagttgccgattacagaggcacagagctttggcctgctggatcccaaactctgctacctgctggatggaatcctcttcatctatggtgtcattctcactgccttgttcctgagagtgaagttcagcaggagcgcagacgcccccgcgtaccagcagggccagaaccagctctataacgagctcaatctaggacgaagagaggagtacgatgttttggacaagagacgtggccgggaccctgagatggggggaaagccgcagagaaggaagaaccctcaggaaggcctgtacaatgaactgcagaaagataagatggcggaggcctacagtgagattgggatgaaaggcgagcgccggaggggcaaggggcacgatggcctttaccagggtctcagtacagccaccaaggacacctacgacgcccttcacatgcaggccctgccccctcgctaacagccaggggatttcaccactcaaaggccagacctgcagacgcccagattatgagacacaggatgaagcatttacaacccggttcactcttctcagccactgaagggccagaagatgaacagactgaccttgatgagctgtgcacaaagtggcataaaaaacatgtggttacacagtgtgaataaagtgctgcggagcaagaggaggccgttgattcacttcacgctttcagcgaatgacaaaatcatctttgtgaaggcctcgcaggaagacccaacacatgggacctataactgcccagcggacagtggcaggacaggaaaaacccgtcaatgtactaggatactgctgcgtcattacagggcacaggccatggatggaaaacgctctctgctctgctttttttctactgttttaatttatactggcatgctaaagccttcctattttgcataataaatgcttcagtgaaa

SEQ ID NO: 1819 - protein, 160 aa, Homo sapiens
MKWKALFTAAILQAQLPITEAQSFGLLDPKLCYLLDGILFIYGVILTALFLRVKFSRSADAPAYQQGQNQLYNELNLGRREEYDVLDKRRGRDPEMGGKPQRRKNPQEGNELQKDKMAEAYSEIGMKGERRRGKGHDGQGLSTATKDTYDALHMQALPPR

SEQ ID NO: 1820 - DNA, 1724 bp, Homo sapiens
gggggagtgcgaatttcttggccctgtcggcaggtgctttctcaaaggccccacagtcctccacttcctggggaggtagctgcagaataaaaccagcagagactccttttctcctaaccgtcccggccaccgctgcctcagcctctgcctcccagcctctttctgagggaaaggacaagatgaagtggaaggcgcttttcaccgcggccatcctgcaggcacagttgccgattacagaggcacagagctttggcctgctggatcccaaactctgctacctgctggatggaatcctcttcatctatggtgtcattctcactgccttgttcctgagagtgaagttcagcaggagcgcagacgcccccgcgtaccagcagggccagaaccagctctataacgagctcaatctaggacgaagagaggagtacgatgttttggacaagagacgtggccgggaccctgagatggggggaaagccgagaaggaagaaccctcaggaaggcctgtacaatgaactgcagaaagataagatggcggaggcctacagtgagattgggatgaaaggcgagcgccggaggggcaaggggcacgatggcctttaccagggtctcagtacagccaccaaggacacctacgacgcccttcacatgcaggccctgccccctcgctaacagccaggggatttcaccactcaaaggccagacctgcagacgcccagattatgagacacaggatgaagcatttacaacccggttcactcttctcagccactgaagtattcccctttatgtacaggatgctttggttatatttagctccaaaccttcacacacagactgttgtccctgcactctttaagggagtgtactcccagggcttacggccctggccttgggccctctggtttgccggtggtgcaggtagacctgtctcctggcggttcctcgttctccctgggaggcgggcgcactgcctctcacagctgagttgttgagtctgttttgtaaagtccccagagaaagcgcagatgctagcacatgccctaatgtctgtatcactctgtgtctgagtggcttcactcctgctgtaaatttggcttctgttgtcaccttcacctcctttcaaggtaactgtactgggccatgttgtgcctccctggtgagagggccgggcagaggggcagatggaaaggagcctaggccaggtgcaaccagggagctgcaggggcatgggaaggtgggcgggcaggggagggtcagccagggcctgcgagggcagcgggagcctccctgcctcaggcctctgtgccgcaccattgaactgtaccatgtgctacaggggccagaagatgaacagactgaccttgatgagctgtgcacaaagtggcataaaaaacatgtggttacacagtgtgaataaagtgctgcggagcaagaggaggccgttgattcacttcacgctttcagcgaatgacaaaatcatctttgtgaaggcctcgcaggaagacccaacacatgggacctataactgcccagcggacagtggcaggacaggaaaaacccgtcaatgtactaggatactgctgcgtcattacagggcacaggccatggatggaaaacgctctctgctctgctttttttctactgttttaatttatactggcatgctaaagccttcctattttgcataataaatgcttcagtgaaaatgcagctttactctaa

SEQ ID NO: 1821 - protein, 159 aa, Homo sapiens
MKWKALFTAAILQAQLPITEAQSFGLLDPKLCYLLDGILFIYGVILTALFLRVKFSRSADAPAYQQGQNQLYNELNLGRREEYDVLDKRRGRDPEMGGKPRRKNPQEGNELQKDKMAEAYSEIGMKGERRRGKGHDGQGLSTATKDTYDALHMQALPPR
